(19) United States
(12) Patent Application Publication
(10) Pub. No.: US 2022/0396611 A1
(43) Pub. Date: Dec. 15, 2022

(54) FACTOR VIII CONSTRUCT

(71) Applicant: Freeline Therapeutics Limited, Stevenage (GB)

(72) Inventors: Azadeh KIA, Enfield (GB); Fabrizio COMPER, Stevenage (GB); Romuald CORBAU, Chiswell Green (GB); Tihomir DODEV, Enfield (GB); Jenny MCINTOSH, Epsom (GB)

(21) Appl. No.: 17/772,816

(22) PCT Filed: Oct. 30, 2020
(86) PCT No.: PCT/GB2020/052761

§ 371 Date: Apr. 28, 2022

(30) Foreign Application Priority Data
Nov. 1, 2019 (GB) 1915953.2
Nov. 1, 2019 (GB) 1915955.7
Nov. 1, 2019 (GB) 1915956.5
Dec. 6, 2019 (GB) 1917925.8
Dec. 6, 2019 (GB) 1917926.6
Dec. 6, 2019 (GB) 1917927.4
Apr. 28, 2020 (GB) 2006250.1

(51) Int. Cl. C07K 14/755; C12N 15/86

(52) U.S. Cl. CPC C07K 14/755; C12N 15/86; C12N 2710/00031; C12N 2710/00042

(57) ABSTRACT

The present invention relates to a Factor VIII (FVIII) polypeptide, a polynucleotide comprising a Factor VIII nucleotide sequence, and a recombinant AAV construct. The invention further relates to an AAV viral particle comprising the recombinant AAV construct of the invention, and a composition comprising the Factor VIII polypeptide, polynucleotide, recombinant AAV construct or AAV viral particle of the invention. The invention also relates to methods of using, and uses of, the Factor VIII polypeptide, polynucleotide, recombinant AAV construct, AAV viral particle and/or composition of the invention. The invention also relates to uses of the recombinant AAV construct of the invention for the production of AAV viral particles, and methods for producing AAV viral particles using the recombinant AAV constructs of the invention.

### FIELD OF THE INVENTION

[0001] The present invention relates to a Factor VIII (FVIII) polypeptide, a polynucleotide comprising a Factor VIII nucleotide sequence, and a recombinant AAV construct. The invention further relates to an AAV viral particle comprising the recombinant AAV construct of the invention, and a composition comprising the Factor VIII polypeptide, polynucleotide, recombinant AAV construct or AAV viral particle of the invention. The invention also relates to methods of using, and uses of, the Factor VIII polypeptide, polynucleotide, recombinant AAV construct, AAV viral particle and/or composition of the invention.

### BACKGROUND OF THE INVENTION

[0002] Haemophilia A is a bleeding disorder caused by a deficiency of blood clotting Factor VIII. It affects 1:4,000 to 1:5,000 live male births worldwide. The majority of cases are inherited as an X-linked recessive trait. Current treatment involves frequent intravenous injections (2-3 times per week) of Factor VIII protein. This treatment is highly effective at arresting bleeding but it is not curative and is extremely expensive (£150,000/patient/year), thus making it unaffordable by the majority of haemophilia A patients in the world. Gene therapy for haemophilia A offers the potential for a cure through persistent, endogenous production of Factor VIII following the transfer of a functioning copy of the Factor VIII gene to an affected patient.

[0003] Factor VIII consists of six domains, namely A1-A2-B-A3-C1-C2. Factor VIII circulates in the bloodstream in an inactive form whilst bound to von Willebrand factor. In response to injury, Factor VIII is activated (often then referred to as Factor VIIIa) and separates from von Willebrand factor. Factor VIIIa interacts with Factor IXa in the coagulation cascade. In particular, Factor FVIIIa is a cofactor for Factor IXa in the activation of Factor X.

### SUMMARY OF THE INVENTION

[0004] The present invention relates to an advantageously short Factor VIII polypeptide and an advantageously short recombinant AAV construct which can express a Factor VIII polypeptide. Recombinant AAV constructs which can express Factor VIII polypeptides are already known and generally have sizes in excess of 5000 nucleotides. Therefore they are significantly larger than the typical wild-type AAV genome size of approximately 4700 nucleotides in length. The present inventors have managed to successfully shorten the length of the Factor VIII polypeptide and the length of the Factor VIII nucleotide sequence. The present inventors have also managed to successfully shorten the length of other components of the recombinant AAV construct. By shortening the length of the Factor VIII nucleotide sequence and/or one or more other components of the recombinant AAV construct, the size of the recombinant AAV construct can be less than 4900, and preferably less than 4800, nucleotides in length and thus advantageously close to the length of a wild-type AAV genome. Shortening the length of the Factor VIII polypeptide also has further advantages, for example reducing the burdens associated with manufacturing, such as time and costs.

[0005] The present inventors have also found that some internally truncated Factor VIII polypeptides of the invention have the further advantage of maintained or increased activity of the Factor VIII polypeptide. Internally truncated Factor VIII polypeptides which lack the PACE/furin cleavage site corresponding to positions 1645 to 1648 of SEQ ID NO:1 may be expressed as single chain polypeptides and may have increased stability and/or specific activity relative to Factor VIII polypeptides which retain the PACE/furin cleavage site. Internally truncated Factor VIII polypeptides which lack residues corresponding to positions 724-740 of SEQ ID NO:1 which are N-terminal to the B domain have been found to retain Factor VIII activity and may be expressed at a higher level. Residues corresponding to positions 714-723 of SEQ ID NO:1 may promote thrombin binding and may optionally be retained in an internally truncated Factor VIII polypeptide of the invention. Internally truncated Factor VIII polypeptides which lack residues corresponding to positions 1649-1669 of SEQ ID NO:1 which are C-terminal to the B domain have also been found to retain FVIII activity and may be expressed at a higher level. Residues corresponding to positions 1670-1689 of SEQ ID NO:1 (optionally residues corresponding to positions 1670-1678 of SEQ ID NO: 1) may be required for von Willebrand factor binding, and may optionally be retained in a Factor VIII polypeptide of the invention. The inventors have therefore identified a number of internally truncated Factor VIII polypeptides which retain Factor VIII activity and are expressed well in vivo and in AAV mediated gene therapy, and which are smaller than Factor VIII polypeptides of the art.

[0006] The present inventors have found that the codon-optimisation described herein of a Factor VIII nucleotide sequence also resulted in the advantage of increased expression of the Factor VIII polypeptide. Thus, the present invention also relates to a polynucleotide sequence which encodes a Factor VIII polypeptide.

[0007] In a first aspect, the present invention provides a Factor VIII polypeptide comprising a Factor VIII amino acid sequence wherein the Factor VIII amino acid sequence comprises a modified beta domain related (BDR) region which is modified relative to wild-type BDR region, which wild-type BDR region corresponds to the region between positions 713 and 1697 of SEQ ID NO:1, wherein:
[0008] (i) the modified BDR region comprises a maximum of 88 amino acids, and the Factor VIII polypeptide has a specific activity which is higher than the specific activity of a polypeptide of SEQ ID NO:7; and/or
[0009] (ii) the modified BDR region comprises a maximum of 74 amino acids.

[0010] In a second aspect, there is provided a polynucleotide comprising a Factor VIII nucleotide sequence, wherein the Factor VIII nucleotide sequence encodes a Factor VIII polypeptide and wherein at least a portion of the Factor VIII nucleotide sequence is not wild-type.

[0011] In a third aspect, there is provided a recombinant AAV construct which comprises a polynucleotide comprising a Factor VIII nucleotide sequence, wherein the Factor VIII nucleotide sequence encodes a Factor VIII polypeptide comprising a Factor VIII amino acid sequence.

[0012] In a fourth aspect, there is provided an AAV viral particle comprising the recombinant AAV of the invention.

[0013] In a fifth aspect, there is provided a Factor FVIII polypeptide encoded by the polynucleotide or recombinant AAV construct of the invention.

[0014] In a sixth aspect, there is provided a composition comprising the Factor VIII polypeptide, polynucleotide, recombinant AAV construct or AAV viral particle of the invention.

[0015] In a seventh aspect, there is provided the Factor VIII polypeptide, polynucleotide, recombinant AAV construct, AAV viral particle or composition of the invention for use in a method of treatment.

[0016] In an eighth aspect, there is provided a method of treatment comprising administering an effective amount of the Factor VIII polypeptide, polynucleotide, recombinant AAV construct or AAV viral particle of the invention to a patient.

[0017] In a ninth aspect, there is provided a use of the Factor VIII polypeptide, polynucleotide, recombinant AAV construct, AAV viral particle or composition of the invention in the manufacture of a medicament for use in a method of treatment.

[0018] In a tenth aspect, there is provided a use of the recombinant AAV construct of the invention for producing a population of AAV viral particles.

[0019] In an eleventh aspect, there is provided a use of the recombinant AAV construct of the invention which is less than 4900 nucleotides in length for:
[0020] a) increasing the vector genome yield during AAV viral particle production when compared to the vector genome yield obtained when a comparator recombinant AAV construct is used;
[0021] b) increasing the vector genome to total particle ratio during AAV viral particle production when compared to the vector genome to total particle ratio obtained when a comparator recombinant AAV construct is used; and/or
[0022] c) decreasing the nucleic acid impurity level during AAV viral particle production when compared to the nucleic acid impurity level obtained when a comparator recombinant AAV construct is used;
   wherein the comparator recombinant AAV construct is more than 4900 nucleotides in length.

[0023] In a twelfth aspect, there is provided a method for producing a population of AAV viral particles comprising:
[0024] a) obtaining the recombinant AAV construct of the invention;
[0025] b) transfecting a host cell with the said recombinant AAV construct; and
[0026] c) culturing the host cell under conditions suitable for AAV viral particle production.

[0027] In a thirteenth aspect, there is provided a method for increasing the vector genome yield during the production of a population of AAV viral particles, comprising:
[0028] a) obtaining a recombinant AAV construct of the invention which is less than 4900 nucleotides in length;
[0029] b) transfecting a host cell with the said recombinant AAV construct; and
[0030] c) culturing the host cell under conditions suitable for AAV viral particle production;
   wherein the vector genome yield is increased when compared to the vector genome yield obtained when a comparator recombinant AAV construct of more than 4900 nucleotides in length is used.

[0031] In a fourteenth aspect, there is provided a method for increasing the vector genome to total particle ratio during the production of a population of AAV viral particles, comprising:
[0032] a) obtaining a recombinant AAV construct of the invention which is less than 4900 nucleotides in length;
[0033] b) transfecting a host cell with the said recombinant AAV construct; and
[0034] c) culturing the host cell under conditions suitable for AAV viral particle production;
   wherein the vector genome to total particle ratio is increased when compared to the vector genome to total particle ratio obtained when a comparator recombinant AAV construct of more than 4900 nucleotides in length is used.

[0035] In a fifteenth aspect, there is provided a method for decreasing the nucleic acid impurity level during the production of a population of AAV viral particles, comprising:
[0036] a) obtaining a recombinant AAV construct of the invention which is less than 4900 nucleotides in length;
[0037] b) transfecting a host cell with the said recombinant AAV construct; and
[0038] c) culturing the host cell under conditions suitable for AAV viral particle production;
   wherein the nucleic acid impurity level is decreased when compared to the nucleic acid impurity level obtained when a comparator recombinant AAV construct of more than 4900 nucleotides in length is used.

[0039] In a sixteenth aspect, there is provided a population of AAV viral particles obtained or obtainable by the methods of the invention.

### DESCRIPTION OF THE FIGURES

[0040] FIG. 1 provides a schematic diagram showing the component parts of an AAV construct of the invention. From the 5′ to the 3′ direction, the AAV construct comprises a 5′ ITR, a promoter, a nucleotide sequence encoding a signal peptide, a Factor VIII nucleotide encoding a Factor VIII polypeptide having a modified BDR region, a polyA sequence and a 3′ ITR region.

[0041] FIG. 2 provides a comparison of FVIII-SQ expression for different codon-optimised nucleotide sequences. 2A—Comparison of the FVIII-SQ expression (FVIII activity) level following Huh7 cell plasmid transfection of 20 codon-optimised (“Co ”) FVIII-SQ coding sequences, as described in Example 2. These data are representative of two separate experiments and each experiment was set in triplicate. 2B—FVIII-SQ antigen level in murine serum 4 weeks after administration with AAV8 expressing FVIII-SQ Co1, Co2, Co3 or Co19, or wild type (“wt”), coding sequences. Bars represent mean of n=5 mice.

[0042] FIG. 3 provides the relationships of the codon-optimised Factor VIII nucleotide sequences. 3A—Percentage identities between each of the codon-optimised Factor VIII nucleotide sequences. 3B —tree diagram showing the relationship between the sequences; the boxed area indicates that codon-optimised sequences 1, 2, 3 and 19 form a distinct group.

[0043] FIG. 4 provides a summary of the codon usage in a number of different codon-optimised Factor VIII nucleotide sequences encoding Factor VIII SQ polynucleotides, in comparison to a corresponding wild-type nucleotide sequence. The total number and percentage of preferred codons was calculated for each codon-optimised sequence.

[0044] FIG. 5 provides the sequences of the modified BDR (Beta Domain Related) region of a number of Factor VIII polypeptides. Polypeptide 95 shows the BDR of a Factor VIII SQ polypeptide. Polypeptide 85 shows the BDR of a Factor VIII RE polypeptide. Polypeptides 96 to 107-117 show the modified BDR regions of Factor VIII polypeptides set forth in SEQ ID NOs:9-36, respectively. These sequences form parts of SEQ ID NOs:9-36. Numbering is with respect to SEQ ID NO:1, the sequence of a full length wild-type Factor VIII polypeptide.

[0045] FIG. 6 provides the specific activity of a number of Factor VIII polypeptides having modified BDR regions. Specific activity (activity/quantity) was calculated for each Factor VIII polypeptide relative to a Factor VIII SQ.

[0046] FIG. 7 provides the level of Factor VIII-SQ polypeptide measured in blood collected from mice four weeks post injection, for polypeptides having a wild-type signal peptide, or signal peptides 5, 8 or 10.

[0047] FIG. 8 provides the results of two (8A-C and 8D-F) in vitro studies conducted using transcription regulatory elements HLP2, FRE46, FRE47, FRE48 and FRE72 in a Factor VIII expression cassette. Huh7 cells were transfected with FVIII-SQ constructs comprising a TRE of interest. The level of FVIII activity in culture supernatant was analysed at day 3 post-transfection. 8A and 8D show the FVIII activity levels (% FVIII:C, determined using the FVIII chromogenic activity assay described below); 8B and 8E show luciferase activity level from the corresponding transfected well; 8C and 8F show normalised FVIII level to the level of luciferase expression thereby showing the relative efficacy of the transcription regulatory element. HLP2 is provided for comparison purposes. The bar charts represent mean values from triplicate experiments. RLU=relative luminescence units.

[0048] FIG. 9 provides the results of in vivo studies conducted using HLP2 and FRE72 in a Factor VIII expression cassette. 6-8-week-old male C57BL/6 mice were intravenously injected with 2×10¹² vg/kg viral vector. Six mice were injected per construct. On day 28 post injection the mice were culled and blood harvested intro citrate anticoagulant. Blood and murine liver were provided for analysis. Blood was used to carry out FVIII analysis while liver biopsies were used to calculate the vector genomes per cell. 9A) shows Factor VIII antigen levels; 9B) shows estimated vector genomes per cell; 9C) shows FVIII antigen levels normalised to the vector genomes per cell thereby showing the relative efficacy of the transcription regulatory element. The bar charts represent mean values (n=6).

[0049] FIG. 10 provides a comparison of the Factor VIII activity levels in plasma from mice injected with pLIVE-SP10-FVIII co19-SQ, pLIVE-SP10-FV111-(96-106 co19), or pLIVE-comparator-FVIIIco-SQ. The comparator codon optimised FVIII SQ nucleotide sequence is an alternative codon optimised FVIII SQ nucleotide sequence set forth in SEQ ID NO:37.

[0050] FIG. 11 provides the results of an in vitro study of AAVS3 dose response of constructs which differ only by the signal peptide. Huh7 cells were transduced with AAVS3 expressing FVIIIco19-SQ coding sequences having a wild-type signal peptide or signal peptide 5. The activity of secreted FVIII was measured over a range of vector doses. MOI=multiplicity of infection.

[0051] FIG. 12 shows the results of in vitro studies into the promoter fidelity of FRE72. FRE72 promoter fidelity was assessed in cell lines from a range of different tissues; Huh7: liver. HEK293T: kidney. PANC1: pancreas. BxPC-3: pancreas. MCF7: breast. 1643: neuroblastoma. MRC-9: lung. 697: early B cell. Cells were transduced with the control vector AAVS3.CAG.GFP or AAVS3.FRE72.GFP or untreated at MOI of 1×10⁵. FIG. 12 shows three columns for each cell type; the left hand column for each cell type (grey) relates to cells transduced with AAVS3.FRE72.GFP; the central column for each cell type (black) relates to cells transduced with the control vector; and the right hand column for each cell type (white) relates to untreated cells. For the HEK293T and MCF-7 cells the left hand (“grey”) column is so small that it is not visible in FIG. 12; similarly for the HEK293T, 1643 and 697 cells the right hand (“white”) columns is so small that it is not visible in FIG. 12.

[0052] FIG. 13 shows the Wimley-White hydrophobicity scale for the free energy (AG) transition of an amino acid from an aqueous phase to a non-aqueous phase (octanol). A more negative ΔG value is associated with a more favourable transition from the aqueous phase into the non-aqueous phase, and denotes a more hydrophobic amino acid.

[0053] FIG. 14 shows the fold-change in SA (specific activity), relative to the FVIII-SQ ('95′) control lacking any substitution mutations, for several different amino-acid substitution mutation variants, including a number of alternative substituted residues for each variant. Variant 65 (11693W) exhibits an elevation in SA relative to 95.

[0054] FIG. 15 shows the fold-change in SA (specific activity), relative to the FVIII-SQ ('95′) control lacking any substitution mutations, for several different double cysteine substitution mutation variants. A number of variants exhibit an elevation in SA relative to 95.

[0055] FIG. 16 shows the Factor VIII specific activity of a series of Factor VIII polypeptides comprising substitution mutations. The effect of the substitution mutations on specific activity was assessed in ‘SQ’ and ‘96-106’ Factor VIII polypeptides, relative to a Factor VIII-SQ control which did not comprise any substitution mutations. Error bars represent the standard deviation from sample duplicates in the ELISA and activity assays.

[0056] FIG. 17 shows Factor VIII specific activity in plasma of C7BL/6 FVIII knockout mice intravenously injected with 2×10¹² vg/kg of AAV8 viral particles made from the constructs FRE72-SP5-FVIIICo19 (26-96-106)-SpA (SEQ ID NO:71); FRE72-SP5-FVIIICo19-SQ-SpA (SEQ ID NO:73); or a comparator construct comprising a codon-optimised FVIII-SQ-encoding sequence with native FVIII signal peptide, SpA and a liver-specific promoter (SEQ ID NO:72), six weeks post-injection. **P=0.0038. The left hand panel shows the specific activity of FRE72-5P5-FVIIICo19 (26-96-106)-SpA (left hand column) and the comparator construct (middle column) relative to a naïve control; the right hand panel shows the specific activity of FRE72-SP5-FVIIICo19-SQ-SpA (left hand column) and the comparator construct (right hand column).

[0057] FIG. 18 shows the vector genome yields (A), the capsid yields (B) and the vector genome to total particle ratios (C) for FRE72-5P5-FVIIICo19 (26-96-106)-SpA and the comparator FVIIIco-SQ produced in the trans-split, two plasmid manufacturing system. Vector genome yields were quantified using a transgene cassette-specific qPCR applicable for both constructs. Capsid yields were determined by Capsid-specific ELISA. The vector genome to total particle ratios were calculated based on the qPCR and ELISA results. The results are shown as fold-changes relative to the comparator FVIIIco-SQ.

[0058] FIG. 19 shows the quantification of encapsidated non-vector nucleic acid (plasmid-derived) for FRE72-5P5-FVIIICo19 (26-96-106)-SpA and the comparator FVIIIco-SQ. Virus particles were purified before analysis by a one-step affinity chromatography step using AVB Sepharose HP. Quantification of encapsidated plasmid-derived impurities is based on qPCRs specific for defined sequences of the kanamycin resistance gene (kanR) (A) or the AAV cap gene (B). The impurity levels were calculated based on the qPCR results. The results are shown as fold-changes relative to the comparator FVIIIco-SQ.

[0059] FIG. 20 shows the analysis of vector integrity for FRE72-5P5-FVIIICo19 (26-96-106)-SpA and the comparator FVIIIco-SQ by alkaline gel electrophoresis. The same number of vector genomes was applied for both constructs. A linear DNA fragment was used as loading control.

[0060] For size determination, a molecular weight marker was included in the gel electrophoresis. Gel staining was performed with SybrGold. Visualization was achieved on an imaging system with an excitation wavelength of 312 nm. The signals reflecting monomer vector genomes are highlighted by an arrow for FRE72-SP5-FVIIICo19 (26-96-106)-SpA and the comparator FVIIIco-SQ.

[0061] FIG. 21 shows the results of an in vivo study conducted to confirm the longevity of the FRE72 promoter. An AAV8 construct comprising an FVIII-SQ transgene under the transcriptional control of the FRE72 promoter was prepared and administered to wild-type mice. Blood samples were taken by tail bleeding (at days 31, 56 and 104 post-injection) and finally via cardiac puncture (at day 230 post-injection). The FVIII antigen level in each sample was measured and the data points are shown on the graph. The bars represent median values.

[0062] FIG. 22—sequence listing.

### DESCRIPTION OF THE SEQUENCE LISTING

| SEQ ID | |
|---|---|
| NO: | DESCRIPTION |
| 1 | Wild-type FVIII amino acid sequence without signal peptide |
| 2 | Wild-type FVIII nucleotide sequence without signal peptide |
| 3 | Codon optimised FVIII SQ nucleotide sequence - Co19 |
| 4 | Codon optimised FVIII SQ nucleotide sequence - Co1 |
| 5 | Codon optimised FVIII SQ nucleotide sequence - Co2 |
| 6 | Codon optimised FVIII SQ nucleotide sequence - Co3 |
| 7 | FVIII SQ amino acid sequence |
| 8 | FVIII RE amino acid sequence |
| 9 | FVIII polypeptide 96 amino acid sequence |
| 10 | FVIII polypeptide 97 amino acid sequence |
| 11 | FVIII polypeptide 98 amino acid sequence |
| 12 | FVIII polypeptide 99 amino acid sequence |
| 13 | FVIII polypeptide 100 amino acid sequence |
| 14 | FVIII polypeptide 101 amino acid sequence |
| 15 | FVIII polypeptide 102 amino acid sequence |
| 16 | FVIII polypeptide 103 amino acid sequence |
| 17 | FVIII polypeptide 104 amino acid sequence |
| 18 | FVIII polypeptide 105 amino acid sequence |
| 19 | FVIII polypeptide 106 amino acid sequence |
| 20 | FVIII polypeptide 107 amino acid sequence |
| 21 | FVIII polypeptide 108 amino acid sequence |
| 22 | FVIII polypeptide 109 amino acid sequence |
| 23 | FVIII polypeptide 110 amino acid sequence |
| 24 | FVIII polypeptide 111 amino acid sequence |
| 25 | FVIII polypeptide 112 amino acid sequence |
| 26 | FVIII polypeptide 113 amino acid sequence |
| 27 | FVIII polypeptide 114 amino acid sequence |
| 28 | FVIII polypeptide 115 amino acid sequence |
| 29 | FVIII polypeptide 116 amino acid sequence |
| 30 | FVIII polypeptide 117 amino acid sequence |
| 31 | FVIII polypeptide 96-106 amino acid sequence |
| 32 | FVIII polypeptide 99-106 amino acid sequence |
| 33 | FVIII polypeptide 96-109 amino acid sequence |
| 34 | FVIII polypeptide 99-109 amino acid sequence |
| 35 | FVIII polypeptide 96-107 amino acid sequence |
| 36 | FVIII polypeptide 107-117 amino acid sequence |
| 37 | FVIII nucleotide sequence disclosed in WO 2017/053677 |
| 38 | FVIII nucleotide sequence disclosed in WO 2017/075619 |
| 39 | Codon optimised (Co19) nucleotide sequence encoding FVIII |
| | polypeptide 96-106 |
| 40 | Codon optimised (Co1) nucleotide sequence encoding FVIII |
| | polypeptide 96-106 |
| 41 | Codon optimised (Co2) nucleotide sequence encoding FVIII |
| | polypeptide 96-106 |
| 42 | Codon optimised (Co3) nucleotide sequence encoding FVIII |
| | polypeptide 96-106 |
| 43 | Core nucleotide sequence |
| 44 | TSS |
| 45 | TSS |
| 46 | TSS |
| 47 | 3′ section of FRE49, FRE72 and FRE75 (297-335 of SEQ |
| | ID NO: 52) |
| 48 | 5′ section of HLP2 (118-162 of SEQ ID: 52) |
| 49 | 3′ section of HLP2 (243-283 of SEQ ID: 52) |
| 50 | Extended core nucleotide sequence |
| 51 | FRE72 TRE (119 bp) |
| 52 | HLP2 TRE (335 bp) |
| 53 | Amino acid sequence of native FVIII signal peptide |
| 54 | Wild-type nucleotide sequence encoding native FVIII signal |
| | peptide |
| 55 | Codon optimised (Co19) nucleotide sequence encoding FVIII |
| | signal peptide |
| 56 | Amino acid sequence of SP5 |
| 57 | Wild-type nucleotide sequence encoding SP5 |
| 58 | Amino acid sequence of SP10 |
| 59 | Wild-type nucleotide sequence encoding SP10 |
| 60 | Amino acid sequence of SP8 |
| 61 | Wild-type nucleotide sequence encoding SP8 |
| 62 | FVIII AAV construct (96-106) |
| 63 | PolyA sequence (17 bp) |
| 64 | PolyA sequence (32 bp) |
| 65 | PolyA sequence (SpA; 49 bp) |
| 66 | PolyA sequence (bGHpA; 208 bp) |
| 67 | AAV2 5′ ITR sequence |
| 68 | Amino acid sequence of AAV capsid |
| 69 | Amino acid sequence of AAV5 capsid |
| 70 | AAV2 3′ ITR sequence |
| 71 | FVIII AAV construct (26-96-106) |
| 72 | FVIII AAV construct (SEQ ID NO: 1 from WO 2017/053677) |
| 73 | FVIII AAV construct (SQ) |
| 74 | FVIII AAV construct (26-SQ) |
| 75 | Codop19 (Co19) nucleotide sequence encoding FVIII 26-96-106 |
| 76 | Codop19 (Co19) nucleotide sequence encoding FVIII 26-SQ |
| 77 | FVIII 26-96-106 amino acid sequence |
| 78 | FVIII 26-SQ amino acid sequence |
| 79 | FVIII 65-96-106 amino acid sequence |
| 80 | FVIII 26-65-96-106 amino acid sequence |
| 81 | FVIII 12SS-96-106 amino acid sequence |
| 82 | FVIII 28SS-96-106 amino acid sequence |
| 83 | FVIII 31SS-96-106 amino acid sequence |
| 84 | FVIII 65-SQ amino acid sequence |
| 85 | FVIII 26-65-SQ amino acid sequence |
| 86 | FVIII 12SS-SQ amino acid sequence |
| 87 | FVIII 28SS-SQ amino acid sequence |
| 88 | FVIII 31SS-SQ amino acid sequence |
| 89 | Amino acids 656-667 of SEQ ID NO: 1 |
| 90 | Amino acids 1823-1834 of SEQ ID NO: 1 |
| 91 | Amino acid sequence of LK03 capsid |
| 92 | Amino acid sequence of AAV6 capsid |
| 93 | The part of FVIII polypeptide SQ amino acid sequence (95) |
| | shown in FIG. 5 which contains the BDR region |
| 94 | The part of FVIII polypeptide RE amino acid sequence (85) |
| | shown in FIG. 5 which contains the BDR region |
| 95 | The part of FVIII polypeptide 96 amino acid sequence shown |
| | in FIG. 5 which contains the modified BDR region |
| 96 | The part of FVIII polypeptide 97 amino acid sequence shown |
| | in FIG. 5 which contains the modified BDR region |
| 97 | The part of FVIII polypeptide 98 amino acid sequence shown |
| | in FIG. 5 which contains the modified BDR region |
| 98 | The part of FVIII polypeptide 99 amino acid sequence shown |
| | in FIG. 5 which contains the modified BDR region |
| 99 | The part of FVIII polypeptide 100 amino acid sequence shown |
| | in FIG. 5 which contains the modified BDR region |
| 100 | The part of FVIII polypeptide 101 amino acid sequence shown |
| | in FIG. 5 which contains the modified BDR region |
| 101 | The part of FVIII polypeptide 102 amino acid sequence shown |
| | in FIG. 5 which contains the modified BDR region |
| 102 | The part of FVIII polypeptide 103 amino acid sequence shown |
| | in FIG. 5 which contains the modified BDR region |
| 103 | The part of FVIII polypeptide 104 amino acid sequence shown |
| | in FIG. 5 which contains the modified BDR region |
| 104 | The part of FVIII polypeptide 105 amino acid sequence shown |
| | in FIG. 5 which contains the modified BDR region |
| 105 | The part of FVIII polypeptide 106 amino acid sequence shown |
| | in FIG. 5 which contains the modified BDR region |
| 106 | The part of FVIII polypeptide 107 amino acid sequence shown |
| | in FIG. 5 which contains the modified BDR region |
| 107 | The part of FVIII polypeptide 108 amino acid sequence shown |
| | in FIG. 5 which contains the modified BDR region |
| 108 | The part of FVIII polypeptide 109 amino acid sequence shown |
| | in FIG. 5 which contains the modified BDR region |
| 109 | The part of FVIII polypeptide 110 amino acid sequence shown |
| | in FIG. 5 which contains the modified BDR region |
| 110 | The part of FVIII polypeptide 111 amino acid sequence shown |
| | in FIG. 5 which contains the modified BDR region |
| 111 | The part of FVIII polypeptide 112 amino acid sequence shown |
| | in FIG. 5 which contains the modified BDR region |
| 112 | The part of FVIII polypeptide 113 amino acid sequence shown |
| | in FIG. 5 which contains the modified BDR region |
| 113 | The part of FVIII polypeptide 114 amino acid sequence shown |
| | in FIG. 5 which contains the modified BDR region |
| 114 | The part of FVIII polypeptide 115 amino acid sequence shown |
| | in FIG. 5 which contains the modified BDR region |
| 115 | The part of FVIII polypeptide 116 amino acid sequence shown |
| | in FIG. 5 which contains the modified BDR region |
| 116 | The part of FVIII polypeptide 117 amino acid sequence shown |
| | in FIG. 5 which contains the modified BDR region |
| 117 | The part of FVIII polypeptide 96-106 amino acid sequence |
| | shown in FIG. 5 which contains the modified BDR region |
| 118 | The part of FVIII polypeptide 99-106 amino acid sequence |
| | shown in FIG. 5 which contains the modified BDR region |
| 119 | The part of FVIII polypeptide 96-109 amino acid sequence |
| | shown in FIG. 5 which contains the modified BDR region |
| 120 | The part of FVIII polypeptide 99-109 amino acid sequence |
| | shown in FIG. 5 which contains the modified BDR region |
| 121 | The part of FVIII polypeptide 96-107 amino acid sequence |
| | shown in FIG. 5 which contains the modified BDR region |
| 122 | The part of FVIII polypeptide 107-117 amino acid sequence |
| | shown in FIG. 5 which contains the modified BDR region |
| 123 | transcription regulatory element ten-nucleotide termination |
| | sequence ‘a’ |
| 124 | transcription regulatory element ten-nucleotide termination |
| | sequence ‘b’ |

### DETAILED DESCRIPTION

[0064] General Definitions

[0065] Unless defined otherwise, technical and scientific terms used herein have the same meaning as commonly understood by a person skilled in the art to which this invention belongs.

[0066] In general, the term “comprising” is intended to mean including but not limited to. For example, the phrase “a Factor VIII polypeptide comprising a Factor VIII amino acid sequence” should be interpreted to mean that the Factor VIII polypeptide has a Factor VIII amino acid sequence, but the Factor VIII polypeptide may contain further amino acids. Similarly, the phrase “a polynucleotide comprising a Factor VIII nucleotide sequence” refers to a polynucleotide that has a Factor VIII nucleotide sequence, but the polynucleotide may contain additional nucleotides.

[0067] In some embodiments of the invention, the word “comprising” is replaced with the phrase “consisting essentially of”. The term “consisting essentially of” means that specific further components can be present, namely those not materially affecting the essential characteristics of the subject matter.

[0068] In some embodiments of the invention, the word “comprising” is replaced with the phrase “consisting of”. The term “consisting of” is intended to be limiting. For example, the phrase “a Factor VIII polypeptide consisting of a Factor VIII amino acid sequence” should be interpreted to mean that the Factor VIII polypeptide has a Factor VIII amino acid sequence and no additional amino acids. Similarly, the phrase “a polynucleotide consisting of a Factor VIII nucleotide sequence” should be understood to mean that the polynucleotide has a Factor VIII nucleotide sequence and no additional nucleotides.

[0069] In some embodiments of the invention, the word “have” can be replaced with the word “comprise” or the phrase “consist of”.

[0070] The terms “protein” and “polypeptide” are used interchangeably herein, and are intended to refer to a polymeric chain of amino acids of any length.

[0071] The terms “nucleic acid molecule” “nucleic acid sequence”, “polynucleotide” and “nucleotide sequence” are used interchangeably herein, and are intended to refer to a polymeric chain of nucleotides of any length.

[0072] In embodiments relating to “one or more substitution mutations”, the terms “substitution mutation” and “amino acid substitution” are used interchangeably herein, and are intended to mean the substitution of one amino acid in an amino acid sequence with a different amino acid. In the phrases “substitution of” amino acid X, or “amino acid X that is (to be) substituted” amino acid X is the original or native amino acid that is present within an amino acid sequence and that is to be replaced. For example, substitution of methionine means that a native methionine amino acid is replaced by another amino acid. In the phrase “substitution with” amino acid Y, amino acid Y is the different amino acid which replaces the original or native amino acid in an amino acid sequence. For example, substitution with methionine refers to replacement of a native (non-methionine) amino acid with methionine. The standard shorthand nomenclature used to define a substitution mutation lists the original or native amino acid at a position within an amino acid sequence that is to be substituted, and the amino acid which replaces the original or native amino acid. For example, a Factor VIII amino acid sequence comprising the substitution mutation M662W refers to a Factor VIII amino acid sequence which comprises a substitution of the methionine residue at a position corresponding to position 662 with a tryptophan residue (i.e. which comprises a tryptophan residue at position 662).

[0073] In embodiments relating to “one or more substitution mutations”, the term “conservative substitution” refers to a substitution mutation in which an amino acid is substituted with another amino acid which has similar biochemical properties, such as size, charge or hydrophobicity. Amino acids may be categorised into groups on the basis of the structure of their side chains: aliphatic (glycine, alanine, valine, leucine, isoleucine); hydroxyl/sulphur-containing (serine, threonine, cysteine, methionine); cyclic (proline); aromatic (phenylalanine, tyrosine, tryptophan); basic (histidine, lysine, arginine); acidic (aspartic acid, glutamic acid); and acid amine (asparagine, glutamine). A “conservative substitution” thus refers to a substitution mutation in which an amino acid is substituted with another amino acid in the same group. Conversely, the term “non-conservative substitution” refers to a substitution in which an amino acid is substituted with another amino acid which has different biochemical properties, i.e. a substitution mutation in which an amino acid is substituted with an amino acid in another group. For example, substitution of aspartic acid with glutamic acid may be considered to be a “conservative substitution”, whilst substitution of aspartic acid with valine may be considered to be a “non-conservative” substitution.

[0074] The terms “wild-type” and “native” are used interchangeably herein, and are intended to describe something which is naturally occurring. For example, a “wild-type Factor VIII amino acid sequence” is an amino acid Factor VIII sequence which occurs in nature.

[0075] The terms “B domain” and “beta domain” are used interchangeably herein in relation to the domains of Factor VIII.

[0076] The terms “AAV viral particle” and “AAV vector” are used interchangeably herein.

[0077] The term “around” used in the context of describing the length of nucleotide or amino acid sequences indicates that a sequence may comprise or consist of a defined number of nucleotides or amino acids, plus or minus 10%, more particularly plus or minus 5%, or more particularly, plus or minus a single integer. For example, reference to an amino acid sequence of “around” 45 amino acids in length may refers to an amino acid sequence of 41-49 amino acids, more particularly 43-47 amino acids, and more particularly 44-46 amino acids in length.

[0078] In some embodiments, the term “around” used in the context of describing the length of nucleotide or amino acid sequences indicates that a sequence may comprise or consist of a defined number of nucleotides or amino acids, plus or minus 1%, more particularly plus or minus 0.1%, more particularly plus or minus 0.01%, or more particularly plus or minus a single integer.

[0079] For the purpose of this invention, in order to determine the percent identity of two sequences (such as two polynucleotide or two polypeptide sequences), the sequences are aligned for optimal comparison purposes (e.g., gaps can be introduced in a first sequence for optimal alignment with a second sequence). The nucleotide or amino acid residues at each position are then compared. When a position in the first sequence is occupied by the same nucleotide or amino acid as the corresponding position in the second sequence, then the nucleotides or amino acids are identical at that position. The percent identity between the two sequences is a function of the number of identical positions shared by the sequences (i.e., % identity=number of identical positions/total number of positions in the reference sequence×100).

[0080] Typically the sequence comparison is carried out over the length of the reference sequence. For example, if the user wished to determine whether a given (“test”) sequence is 95% identical to SEQ ID NO: 3, SEQ ID NO: 3 would be the reference sequence. To assess whether a sequence is at least 95% identical to SEQ ID NO: 3 (an example of a reference sequence), the skilled person would carry out an alignment over the length of SEQ ID NO: 3, and identify how many positions in the test sequence were identical to those of SEQ ID NO: 3. If at least 95% of the positions are identical, the test sequence is at least 95% identical to SEQ ID NO: 3. If the sequence is shorter than SEQ ID NO: 3, the gaps or missing positions should be considered to be non-identical positions.

[0081] The skilled person is aware of different computer programs that are available to determine the homology or identity between two sequences. For instance, a comparison of sequences and determination of percent identity between two sequences can be accomplished using a mathematical algorithm. In an embodiment, the percent identity between two amino acid or nucleic acid sequences is determined using the Needleman and Wunsch (1970) algorithm which has been incorporated into the GAP program in the Accelrys GCG software package (available at http://www.accelrys.com/products/gcg/), using either a Blosum 62 matrix or a PAM250 matrix, and a gap weight of 16, 14, 12, 10, 8, 6, or 4 and a length weight of 1, 2, 3, 4, 5, or 6.

[0082] The singular forms “a”, “an”, and “the” include plural referents unless the content clearly dictates otherwise. Thus, for example, reference to “an amino acid” includes two or more instances or versions of such amino acids.

[0083] All publications, patents and patent applications cited herein, whether supra or infra, are hereby incorporated by reference in their entirety.

[0084] A Factor VIII polypeptide comprising a Factor VIII amino acid sequence wherein the Factor VIII amino acid sequence comprises a modified beta domain related (BDR) region

[0085] The present invention provides a Factor VIII polypeptide comprising a Factor VIII amino acid sequence wherein the Factor VIII amino acid sequence comprises a BDR region which is modified relative to wild-type BDR region, which wild-type BDR region corresponds to the region between positions 713 and 1697 of SEQ ID NO: 1, wherein:
[0086] (i) the modified BDR region comprises a maximum of 88 amino acids, and the Factor VIII polypeptide has a specific activity which is higher than the specific activity of a polypeptide of SEQ ID NO: 7; and/or
[0087] (ii) the modified BDR region comprises a maximum of 74 amino acids.

[0088] The Factor VIII amino acid sequence may comprise all or part of a signal peptide, such as any of those described herein. The Factor VIII polypeptide may be a mature Factor VIII polypeptide. A “mature Factor VIII polypeptide” is a Factor VIII polypeptide which does not comprise a signal peptide. The signal peptide may have been cleaved following synthesis. The signal peptide may never have been present. For example, the Factor VIII amino acid sequence may never have comprised a signal peptide.

[0089] Wild-type Factor VIII polypeptide comprises an A1 domain, an A2 domain, a B domain, an A3 domain, a C1 domain and a C2 domain. The Factor VIII polypeptide of the invention may comprise all or part of each of the A1 domain, the A2 domain, the A3 domain, the C1 domain and/or the C2 domain. The Factor VIII polypeptide may comprise part of the B domain. The Factor VIII polypeptide may not comprise the B domain. Any or all of the domains may comprise one or more modifications, such as substitutions, insertions and/or deletions, when the Factor VIII amino acid sequence of the domain is compared to a wild-type Factor VIII amino acid sequence.

[0090] The Factor VIII polypeptide may comprise an amino acid sequence which is at least 90% identical to at least 300 amino acids of an A1 domain. The Factor VIII polypeptide may comprise an amino acid sequence which is at least 95%, at least 98%, at least 99% or 100% identical to at least 300 amino acids of an A1 domain. The Factor VIII polypeptide may comprise an amino acid sequence which is at least 90% identical to an A1 domain. The Factor VIII polypeptide may comprise an amino acid sequence which is at least 95%, at least 98%, at least 99% or 100% identical to an A1 domain. The Factor VIII polypeptide may comprise an amino acid sequence which is at least 90% identical to at least 300 amino acids of the amino acids corresponding to positions 1 to 329 of SEQ ID NO: 1. The Factor VIII polypeptide may comprise an amino acid sequence which is at least 95%, at least 98%, at least 99% or 100% identical to at least 300 amino acids of the amino acids corresponding to positions 1 to 329 of SEQ ID NO: 1. The Factor VIII polypeptide may comprise an amino acid sequence which is at least 90% identical to the amino acids corresponding to positions 1 to 329 of SEQ ID NO: 1. The Factor VIII polypeptide may comprise an amino acid sequence which is at least 95%, at least 98%, at least 99% or 100% identical to the amino acids corresponding to positions 1 to 329 of SEQ ID NO: 1.

[0091] The Factor VIII polypeptide may comprise an amino acid sequence which is at least 90% identical to at least 300 amino acids of an A2 domain. The Factor VIII polypeptide may comprise an amino acid sequence which is at least 95%, at least 96%, at least 98%, at least 99% or 100% identical to at least 300 amino acids of an A2 domain. The Factor VIII polypeptide may comprise an amino acid sequence which is at least 90% identical to an A2 domain. The Factor VIII polypeptide may comprise an amino acid sequence which is at least 95%, at least 96%, at least 98%, at least 99% or 100% identical to an A2 domain. The Factor VIII polypeptide may comprise an amino acid sequence which is at least 90% identical to at least 300 amino acids of the amino acids corresponding to positions 380 to 711 of SEQ ID NO:1. The Factor VIII polypeptide may comprise an amino acid sequence which is at least 95%, at least 98%, at least 99% or 100% identical to at least 300 amino acids of the amino acids corresponding to positions 380 to 711 of SEQ ID NO:1. The Factor VIII polypeptide may comprise an amino acid sequence which is at least 90% identical to the amino acids corresponding to positions 380 to 711 of SEQ ID NO:1. The Factor VIII polypeptide may comprise an amino acid sequence which is at least 95%, at least 98%, at least 99% or 100% identical to the amino acids corresponding to positions 380 to 711 of SEQ ID NO:1.

[0092] The Factor VIII polypeptide may comprise an amino acid sequence which is at least 90% identical to at least 300 amino acids of an A3 domain. The Factor VIII polypeptide may comprise an amino acid sequence which is at least 95%, at least 96%, at least 98%, at least 99% or 100% identical to at least 300 amino acids of an A3 domain. The Factor VIII polypeptide may comprise an amino acid sequence which is at least 90% identical to an A3 domain. The Factor VIII polypeptide may comprise an amino acid sequence which is at least 95%, at least 96%, at least 98%, at least 99% or 100% identical to an A3 domain. The Factor VIII polypeptide may comprise an amino acid sequence which is at least 90% identical to at least 300 amino acids of the amino acids corresponding to positions 1694 to 2021 of SEQ ID NO:1. The Factor VIII polypeptide may comprise an amino acid sequence which is at least 95%, at least 98%, at least 99% or 100% identical to at least 300 amino acids of the amino acids corresponding to positions 1694 to 2021 of SEQ ID NO:1. The Factor VIII polypeptide may comprise an amino acid sequence which is at least 90% identical to the amino acids corresponding to positions 1694 to 2021 of SEQ ID NO:1. The Factor VIII polypeptide may comprise an amino acid sequence which is at least 95%, at least 98%, at least 99% or 100% identical to the amino acids corresponding to positions 1694 to 2021 of SEQ ID NO:1.

[0093] The Factor VIII polypeptide may comprise an amino acid sequence which is at least 90% identical to at least 130, at least 135 or at least 140 amino acids of a C1 domain. The Factor VIII polypeptide may comprise an amino acid sequence which is at least 95%, at least 96%, at least 98%, at least 99% or 100% identical to at least 130, at least 135 or at least 140 amino acids of a C1 domain. The Factor VIII polypeptide may comprise an amino acid sequence which is at least 90% identical to a C1 domain. The Factor VIII polypeptide may comprise an amino acid sequence which is at least 95%, at least 96%, at least 98%, at least 99% or 100% identical to a C1 domain. The Factor VIII polypeptide may comprise an amino acid sequence which is at least 90% identical to at least 130, at least 135 or at least 140 amino acids of the amino acids corresponding to positions 2021 to 2169 of SEQ ID NO:1. The Factor VIII polypeptide may comprise an amino acid sequence which is at least 95%, at least 98%, at least 99% or 100% identical to at least 130, at least 135 or at least 140 amino acids of the amino acids corresponding to positions 2021 to 2169 of SEQ ID NO:1. The Factor VIII polypeptide may comprise an amino acid sequence which is at least 90% identical to the amino acids corresponding to positions 2021 to 2169 of SEQ ID NO:1. The Factor VIII polypeptide may comprise an amino acid sequence which is at least 95%, at least 98%, at least 99% or 100% identical to the amino acids corresponding to positions 2021 to 2169 of SEQ ID NO:1.

[0094] The Factor VIII polypeptide may comprise an amino acid sequence which is at least 90% identical to at least 130, at least 135 or at least 140 amino acids of a C2 domain. The Factor VIII polypeptide may comprise an amino acid sequence which is at least 95%, at least 96%, at least 98%, at least 99% or 100% identical to at least 130, at least 135 or at least 140 amino acids of a C2 domain. The Factor VIII polypeptide may comprise an amino acid sequence which is at least 90% identical to a C2 domain. The Factor VIII polypeptide may comprise an amino acid sequence which is at least 95%, at least 96%, at least 98%, at least 99% or 100% identical to a C2 domain. The Factor VIII polypeptide may comprise an amino acid sequence which is at least 90% identical to at least 130, at least 135 or at least 140 amino acids of the amino acids corresponding to positions 2174 to 2326 of SEQ ID NO:1. The Factor VIII polypeptide may comprise an amino acid sequence which is at least 95%, at least 98%, at least 99% or 100% identical to at least 130, at least 135 or at least 140 amino acids of the amino acids corresponding to positions 2174 to 2326 of SEQ ID NO:1. The Factor VIII polypeptide may comprise an amino acid sequence which is at least 90% identical to the amino acids corresponding to positions 2174 to 2326 of SEQ ID NO:1. The Factor VIII polypeptide may comprise an amino acid sequence which is at least 95%, at least 98%, at least 99% or 100% identical to the amino acids corresponding to positions 2174 to 2326 of SEQ ID NO:1.

[0095] The wild-type BDR region corresponds to the region between positions 713 and 1697 of SEQ ID NO: 1. When referring to amino acid positions, the term “between” does not include the specified positions. Thus the wild-type BDR region starts at the position that corresponds to position 714 of SEQ ID NO: 1 and ends at the position that corresponds to position 1696 of SEQ ID NO: 1. The wild-type BDR region comprises the beta domain of Factor VIII. The wild-type BDR region may be the region between positions 713 and 1697 of SEQ ID NO: 1. The wild-type BDR region may start at the position 714 of SEQ ID NO: 1 and may end at position 1696 of SEQ ID NO: 1. The wild-type BDR region may be the region from another wild-type Factor VIII amino acid sequence which corresponds to the region between positions 713 and 1697 of SEQ ID NO: 1. The wild-type BDR region may be the region from another wild-type Factor VIII amino acid sequence which corresponds to the region that starts at position 714 of SEQ ID NO: 1 and ends at position 1696 of SEQ ID NO: 1.

[0096] It is within the capabilities of the person skilled in the art to determine the region of a wild-type Factor VIII amino acid sequence which “corresponds to” the region between positions 713 and 1697 of SEQ ID NO: 1. For example, the person skilled in the art merely needs to perform a sequence alignment of the wild-type Factor VIII amino acid sequence with SEQ ID NO: 1 using a suitable alignment algorithm such as that of Needleman and Wunsch described above, and determine which region of the wild-type Factor VIII amino acid sequence aligns with the region between positions 713 and 1697 of SEQ ID NO: 1. For example, the person skilled in the art may determine which region of the wild-type Factor VIII amino acid sequence aligns with positions 714 to 1696 of SEQ ID NO: 1.

[0097] The “modified BDR region” is not identical to the wild-type BDR region. The modified BDR region is shorter than wild-type BDR region. A skilled person can readily determine whether the modified BDR region of a Factor VIII polypeptide “is modified relative to wild-type BDR region”. For example, the person skilled in the art merely needs to perform a sequence alignment of the Factor VIII amino acid sequence with a wild-type Factor VIII amino acid sequence of the Factor VIII polypeptide using a suitable alignment algorithm such as that of Needleman and Wunsch described above, determine the region of the Factor VIII amino acid sequence (modified BDR region) which aligns with the region of wild-type Factor VIII amino acid sequence (wild-type BDR region) that corresponds to the region between positions 713 and 1697 of SEQ ID NO: 1, and compare the amino acid sequence between the region in the Factor VIII amino acid sequence (modified BDR region) and the region in the wild-type Factor VIII amino acid sequence (wild-type BDR region). If there are any differences, then the region is a modified BDR region.

[0098] Since the modified BDR region of the Factor VIII polypeptide of the invention comprises a maximum of 88 amino acids, there will be one or more gap(s) in the Factor VIII amino acid sequence in the modified BDR region compared to wild-type BDR region when the Factor VIII amino acid sequence is aligned with the wild-type Factor VIII amino acid sequence. Thus, the modified BDR region of the Factor VIII polypeptide of the invention comprises one or more deletion(s) when the modified BDR region is compared to a wild-type BDR region. The modified BDR region may also have one or more modifications, such as substitutions and/or insertions, when the modified BDR region is compared to a wild-type BDR region. The modified BDR region may comprise one or more amino acids found in a wild-type BDR region. For example, the modified BDR region may comprise one or more stretches of amino acids found in a wild-type BDR region.

[0099] The modified BDR region “comprises a maximum” of a specified number of amino acids. This means that the modified BDR region comprises no more than the specified number of amino acids. The Factor VIII amino acid sequence may comprise further amino acids, but not in the modified BDR region. For example, if the modified BDR region “comprises a maximum of 88 amino acids”, the modified BDR region comprises no more than 88 amino acids. As a further example, if the modified BDR region “comprises a maximum of 74 amino acids”, the modified BDR region comprises no more than 74 amino acids.

[0100] The “Factor VIII polypeptide” is functional. A functional Factor VIII polypeptide is one which can, when activated by thrombin, form an enzymatic complex with Factor IXa, phospholipids and calcium, and the enzymatic complex can catalyse the conversion of Factor X to Factor Xa.

[0101] It is within the abilities of the person skilled in the art to determine whether a Factor VIII polypeptide is functional. The person skilled in the art merely needs to determine the specific activity of the Factor VIII polypeptide. If the specific activity of the polypeptide is at least 20% of the specific activity of a wild-type Factor VIII polypeptide such as a Factor VIII polypeptide of SEQ ID NO: 1, then it is functional. The activity of the Factor VIII polypeptide can be analysed using a chromogenic assay, such as a chromogenic assay that measures cofactor activity. For example, a suitable chromogenic assay is as follows. The

[0102] Factor VIII polypeptide is mixed with human Factor X polypeptide and Factor IXa polypeptide, thrombin, phospholipids and calcium. The thrombin activates the Factor VIII polypeptide to form Factor VIIIa polypeptide. The thrombin-activated Factor VIII polypeptide forms an enzymatic complex with Factor IXa polypeptide, phospholipids and calcium, which enzymatic complex can catalyse the conversion of Factor X polypeptide to Factor Xa polypeptide. The activity of the Factor Xa polypeptide can catalyse cleavage of a chromogenic substrate (e.g. SXa-11) to produce pNA. The level of pNA generated can be measured by determining colour development at 405 nm (e.g. measured by absorbance). Factor X polypeptide, and therefore Factor Xa polypeptide, is provided in excess. Therefore the limiting factor is Factor VIIIa polypeptide. Thus, the level of pNA generated is proportional to the amount of the Factor Xa polypeptide generated by Factor FVIIIa polypeptide in the sample, which is proportional to the activity of Factor FVIIIa polypeptide in the sample. The activity of Factor FVIIIa polypeptide in the sample is a measure of the cofactor activity of the Factor FVIII polypeptide in the sample.

[0103] For example, a suitable chromogenic assay is the BIOPHEN FVIII:C assay (Ref: 221406) manufactured by HYPHEN BioMed as used in the Examples. The activity of the Factor VIII polypeptide may be measured using the BIOPHEN FVIII:C assay.

[0104] The activity of the Factor VIII polypeptide can be analysed using a clotting assay. The assay may be a one-stage clotting assay. For example, a suitable clotting assay (a one-stage clotting assay) is as follows.

[0105] Since Factor VIII is part of the clotting cascade, a Factor VIII polypeptide that has increased activity will catalyse blood clotting more quickly than a Factor VIII polypeptide that has a lower activity. The Factor VIII polypeptide is mixed with platelet poor plasma, and incubated at 37° C. Then phospholipid and a contact activation pathway activator such as Kaolin or SynthaSIL APTT reagent are added. Calcium is then added, and the user measures the time taken for clotting to occur. Clot formation can be assessed directly by a magnetic steel ball method. Clot formation may be measured using a rotating cuvette assay in which a steel ball remains stationary in a magnetic field until the formation of fibrin strands around the ball produces movement and a change in the magnetic field can be detected. Alternatively, clot formation may be measured using a rotating steel ball assay in which a steel ball is rotated under the influence of a magnet until the formation of fibrin strands around the ball stops it rotating, which can be detected by a sensor. In either event, coagulation time may be recorded.

[0106] In patients, such as human patients, the activity of the Factor VIII polypeptide may be measured by taking a blood sample from the patient, or by performing an assay on a blood sample that has been taken from the patient.

[0107] The activity of the Factor VIII polypeptide can be analysed using a tail clip assay. A suitable tail clip assay may involve administering Factor VIII polypeptide, or polynucleotide comprising a Factor VIII nucleotide sequence in the context of a gene therapy, to mice such as knock-out mice deficient in Factor VIII. The tails of the mice are then clipped, and the time taken for the cut in the tails to clot is measured. The duration of bleeding provides a relative measure of the activity of the administered Factor VIII, for example a Factor VIII polypeptide comprising a Factor VIII amino acid sequence comprising a modified BDR region vs wild-type Factor VIII, or a Factor VIII polypeptide which is encoded by a Factor VIII nucleotide sequence wherein at least a portion of the Factor VIII nucleotide sequence is not wild-type vs wild-type Factor VIII.

[0108] For the purposes of the present application, the term “specific activity” refers to the activity (e.g. clotting activity or intrinsic enzyme activity) per unit (e.g. per jug, per IU, or per antigen level as % of level in normal human plasma) of Factor VIII polypeptide such that the activity is ‘normalised’ to take account of the amount or concentration of Factor VIII polypeptide in the sample. (Note that, typically, pooled healthy human plasma has a Factor VIII concentration of 0.2 μg/ml.) This can be done by measuring the concentration of the Factor VIII polypeptide in the sample, for example by using a standard ELISA assay, such as the assay described in Example 1, and dividing the activity by the Factor VIII concentration. A chromogenic assay may be used to measure “specific activity”. A chromogenic assay may be used to measure “specific activity” by calculating activity and dividing by the concentration of the Factor VIII polypeptide in the sample. The chromogenic assay may be any one of the chromogenic assays described herein. A clotting assay may be used to measure “specific activity”, by calculating activity and dividing by the concentration of the Factor VIII polypeptide in the sample. The clotting assay may be any one of the clotting assays described herein.

[0109] In an example of an ELISA assay, an antibody that binds to the Factor VIII polypeptide could be bound to a plate. The sample, comprising the Factor VIII polypeptide at unknown concentration, could be passed over the plate. A second detection antibody that binds to the Factor VIII polypeptide could be applied to the plate, and any excess washed off. The detection antibody that remains (i.e. is not washed off) will be bound to the Factor VIII polypeptide. The detection antibody could be linked to an enzyme such as horse radish peroxidase. The level of detection antibody that binds to the Factor VIII polypeptide on the plate could be measured by measuring the amount of the detection antibody. For example, if the detection antibody is linked to horse radish peroxidase, the horse radish peroxidase can catalyse the production of a blue reaction product from a substrate such as TMB (3,3′,5,5′-tetramethylbenzidine), and the level of the blue product can be detected by absorbance at 450 nm. The level of the blue product is proportional to the amount of detection antibody that remained after the washing step, which is proportional to the amount of the Factor VIII polypeptide in the sample. Alternatively, for example when using purified protein, the amount or concentration of Factor VIII polypeptide may be determined spectrophotometrically.

[0110] In preferred embodiments, the Factor VIII polypeptide is purified, and the specific activity is measured by a clotting assay or a chromogenic assay carried out on the purified Factor VIII polypeptide. In some embodiments, the specific activity of the Factor VIII polypeptide is measured by generating an AAV particle comprising a polynucleotide encoding the Factor VIII polypeptide, injecting mice with the AAV particle, and detecting the specific activity in plasma from the mice using a chromogenic assay. In some embodiments, the specific activity of the Factor VIII polypeptide is measured by providing cells stably expressing a polynucleotide encoding the Factor VIII polypeptide, harvesting Factor VIII polypeptide from the cells and/or culture medium, and measuring the specific activity of the Factor VIII polypeptide using a chromogenic assay.

[0111] The Factor VIII polypeptide may have a specific activity which is at least 50%, at least 60%, at least 70%, at least 75%, at least 80%, at least 85%, at least 90%, at least 95%, at least 98%, at least 99%, or at least 100% of the specific activity of a reference wild-type Factor VIII polypeptide. The “reference wild-type Factor VIII polypeptide” may be any wild-type Factor FVIII polypeptide, such as the Factor VIII polypeptide of SEQ ID NO: 1. The Factor VIII polypeptide may have a specific activity which is higher than the specific activity of a reference wild-type Factor VIII polypeptide, such as the Factor VIII polypeptide of SEQ ID NO: 1. The Factor VIII polypeptide may have a specific activity which is at least 1.2 fold, at least 1.5 fold, at least 1.7 fold, at least 1.8 fold, at least 2 fold, at least 2.2 fold, at least 2.5 fold, at least 3 fold, at least 3.5 fold, at least 4 fold, at least 4.5 fold, at least 5 fold, or at least 5.5 fold higher than the specific activity of a reference wild-type Factor VIII, such as the Factor VIII polypeptide of SEQ ID NO: 1. The Factor VIII polypeptide may have a specific activity which is between 1.2 fold and 5.5 fold, or between 1.5 fold and 5 fold, higher than the specific activity of a reference wild-type Factor VIII, such as the Factor VIII polypeptide of SEQ ID NO: 1. When referring to fold changes of activity, the term “between” includes the specified values. Thus, for example, “between 1.2 fold and 5.5 fold” includes the values 1.2 and 5.5.

[0112] The Factor VIII polypeptide may have a specific activity which is at least 50%, at least 60%, at least 70%, at least 75%, at least 80%, at least 85%, at least 90%, at least 95%, at least 98%, at least 99%, or at least 100% of the specific activity of the Factor VIII polypeptide of SEQ ID NO: 7. The Factor VIII polypeptide may have a specific activity which is higher than the specific activity of a polypeptide of SEQ ID NO: 7. The Factor VIII polypeptide may have a specific activity which is at least 1.2 fold, at least 1.5 fold, at least 1.7 fold, at least 1.8 fold, at least 2 fold, at least 2.2 fold, at least 2.5 fold, at least 3 fold, at least 3.5 fold, at least 4 fold, at least 4.5 fold, at least 5 fold, or at least 5.5 fold higher than the specific activity of the Factor VIII polypeptide of SEQ ID NO: 7. The Factor VIII polypeptide may have a specific activity which is between 1.2 fold and 5.5 fold, or between 1.5 fold and 5 fold, higher than the specific activity of the Factor VIII polypeptide of SEQ ID NO: 7. The Factor VIII polypeptide may have a specific activity which is at least 1.5 fold higher than the specific activity of the Factor VIII polypeptide of SEQ ID NO: 7. The Factor VIII polypeptide may have a specific activity which is at least 2 fold higher than the specific activity of the Factor VIII polypeptide of SEQ ID NO: 7. The Factor VIII polypeptide may have a specific activity which is between 1.5 fold and 3 fold higher than the specific activity of the Factor VIII polypeptide of SEQ ID NO: 7.

[0113] The Factor VIII polypeptide may have a specific activity which is at least 50%, at least 60%, at least 70%, at least 75%, at least 80%, at least 85%, at least 90%, at least 95%, at least 98%, at least 99%, or at least 100% of the specific activity of the Factor VIII polypeptide of SEQ ID NO: 8. The Factor VIII polypeptide may have a specific activity which is higher than the specific activity of the Factor VIII polypeptide of SEQ ID NO: 8. The Factor VIII polypeptide may have a specific activity which is at least 1.2 fold, at least 1.5 fold, at least 1.7 fold, at least 1.8 fold, at least 2 fold, at least 2.2 fold, at least 2.5 fold, at least 3 fold, at least 3.5 fold, at least 4 fold, at least 4.5 fold, at least 5 fold, or at least 5.5 fold higher than the specific activity of the Factor VIII polypeptide of SEQ ID NO: 8. The Factor VIII polypeptide may have a specific activity which is between 1.2 fold and 5.5 fold, or between 1.5 fold and 5 fold, higher than the specific activity of the Factor VIII polypeptide of SEQ ID NO: 8.

[0114] The Factor VIII polypeptide may have a specific activity which is higher than the specific activity of the Factor VIII polypeptide encoded by SEQ ID NO:37. The Factor VIII polypeptide may have a specific activity which is at least 50%, at least 60%, at least 70%, at least 75%, at least 80%, at least 85%, at least 90%, at least 95%, at least 98%, at least 99%, or at least 100% of the specific activity of the Factor VIII polypeptide encoded by SEQ ID NO: 37. The Factor VIII polypeptide may have a specific activity which is higher than the specific activity of the Factor VIII polypeptide encoded by SEQ ID NO: 37. The Factor VIII polypeptide may have a specific activity which is at least 1.2 fold, at least 1.5 fold, at least 1.7 fold, at least 1.8 fold, at least 2 fold, at least 2.2 fold, at least 2.5 fold, at least 3 fold, at least 3.5 fold, at least 4 fold, at least 4.5 fold, at least 5 fold, or at least 5.5 fold higher than the specific activity of the Factor VIII polypeptide encoded by SEQ ID NO: 37. The Factor VIII polypeptide may have a specific activity which is between 1.2 fold and 5.5 fold, or between 1.5 fold and 5 fold, higher than the specific activity of the Factor VIII polypeptide encoded by SEQ ID NO: 37. The Factor VIII polypeptide may have a specific activity which is at least 1.5 fold higher than the specific activity of the Factor VIII polypeptide encoded by SEQ ID NO: 37. The Factor VIII polypeptide may have a specific activity which is at least 2 fold higher than the specific activity of the Factor VIII polypeptide encoded by SEQ ID NO: 37. The Factor VIII polypeptide may have a specific activity which is between 1.5 fold and 3 fold higher than the specific activity of the Factor VIII polypeptide encoded by SEQ ID NO: 37.

[0115] The Factor VIII polypeptide may have a specific activity which is higher than the specific activity of the Factor VIII polypeptide encoded by SEQ ID NO:38.

[0116] The modified BDR region comprises a maximum of 88 amino acids. The modified BDR region may comprise a maximum of 87, 85, 80, 75, 70, 65, 60, 55, 50, or 45 amino acids. Preferably, the modified BDR region may comprise a maximum of 74 amino acids. The modified BDR region may comprise a maximum of 54 amino acids. The modified BDR region may comprise a maximum of 47 amino acids. The modified BDR region may comprise a maximum of 45 amino acids.

[0117] The modified BDR region may comprise at least 20, at least 25, at least 28, at least 30, at least 35, at least 40, at least 45, at least 50, at least 54, at least 55, at least 57, at least 58, at least 60, or at least 65 amino acids. The modified BDR region may comprise at least 28 amino acids. The modified BDR region may comprise at least 30 amino acids. The modified BDR region may comprise at least 45 amino acids. The modified BDR region may comprise at least 54 amino acids. The modified BDR region may comprise at least 57 amino acids. The modified BDR region may comprise at least 58 amino acids.

[0118] The modified BDR region may consist of between 20 and 89 amino acids, between 25 and 89, between 27 and 89, between 27 and 80, between 27 and 75, between 27 and 70, between 27 and 65, between 27 and 60, between 27 and 55, or between 27 and 50. The modified BDR region may consist of between 30 and 89, between 30 and 89, between 30 and 80, between 30 and 75, between 30 and 70, between 30 and 65, between 30 and 60, between 30 and 55, or between 30 and 50. The modified BDR region may consist of between 27 and 48, between 30 and 48, between 33 and 48, between 35 and 48, between 40 and 48, or between 42 and 48 amino acids. The modified BDR region may consist of between 28 and 48 amino acids. The modified BDR region may consist of between 30 and 48 amino acids. The modified BDR region may consist of around 45 amino acids. The modified BDR region may consist of 45 amino acids.

[0119] When referring to numbers of amino acids, the term “between” does not include the specified values. For example, when the modified BDR region “consists of between 20 and 89 amino acids”, the modified BDR region consists of from 21 to 88 amino acids.

[0120] The modified BDR region may consist of between 40 and 75, between 40 and 70, between 40 and 65, or between 40 and 60 amino acids. The modified BDR region may consist of between 53 and 89, between 53 and 75, between 56 and 75, between 57 and 75, or between 60 and 75 amino acids. The modified BDR region may consist of between 40 and 60 amino acids. The modified BDR region may consist of around 54 amino acids. The modified BDR region may consist of 54 amino acids.

[0121] Optionally, the Factor VIII amino acid sequence does not comprise at least 806, at least 810, at least 820, at least 835, at least 850, at least 875, or 894 amino acids corresponding to positions 746 to 1639 of SEQ ID NO: 1. Optionally, the Factor VIII amino acid sequence does not comprise at least 806 or at least 820 amino acids corresponding to positions 746 to 1639 of SEQ ID NO: 1. Optionally, the Factor VIII amino acid sequence does not comprise all the amino acids corresponding to positions 746 to 1639 of SEQ ID NO: 1. Optionally, the Factor VIII amino acid sequence does not comprise at least 820, at least 825, at least 834, at least 850, at least 875, or 908 amino acids corresponding to positions 741 to 1648 of SEQ ID NO: 1. Optionally, the Factor VIII amino acid sequence does not comprise at least 820 or at least 834 amino acids corresponding to positions 741 to 1648 of SEQ ID NO: 1. Optionally, the Factor VIII amino acid sequence does not comprise all the amino acids corresponding to positions 741 to 1648 of SEQ ID NO: 1. Optionally, the Factor VIII amino acid sequence does not comprise the beta domain.

[0122] Optionally, the Factor VIII amino acid sequence may be more than 1348 amino acids in length. Optionally, the Factor VIII amino acid sequence may be less than 1439 amino acids in length.

[0123] Optionally, the Factor VIII amino acid sequence may be at least 1349 amino acids in length.

[0124] Optionally, the Factor VIII amino acid sequence may be 1438 or fewer amino acids in length.

[0125] Optionally, the Factor VIII amino acid sequence may be at least 1357, at least 1364, at least 1366, at least 1374, at least 1376, at least 1379, at least 1384, at least 1389, or at least 1392 amino acids in length. Optionally, the Factor VIII amino acid sequence may be 1421 or fewer, 1418 or fewer, 1412 or fewer, 1409 or fewer, 1406 or fewer, 1403 or fewer, 1400 or fewer, or 1397 or fewer amino acids in length.

[0126] Optionally, the Factor VIII amino acid sequence may be between 1439 and 1348, between 1439 and 1356, between 1422 and 1375, between 1404 and 1383 or around 1394 amino acids in length. Optionally, the Factor VIII amino acid sequence may be between 1422 and 1356, between 1422 and 1367, between 1419 and 1375, between 1422 and 1376, between 1413 and 1384, between 1410 and 1385, between 1407 and 1388, between 1404 and 1389, between 1401 and 1390, between 1398 and 1391 or around 1394 amino acids in length. Optionally, the Factor VIII amino acid sequence may be around 1394 amino acids in length.

[0127] Optionally, the Factor VIII amino acid sequence may be between 1439 and 1383, between 1439 and 1402, between 1439 and 1426 or around 1438 amino acids in length. Optionally, the Factor VIII amino acid sequence may be around 1438 amino acids in length.

[0128] Optionally, the Factor VIII amino acid sequence may be around 1357, 1368, 1376, 1377, 1383, 1384, 1385, 1386, 1391, 1394, 1395, 1397, 1400, 1403, 1406, 1409, 1412, 1415, 1418 or 1421 amino acids in length. Optionally, the Factor VIII amino acid sequence may be 1357, 1368, 1376, 1377, 1383, 1384, 1385, 1386, 1391, 1394, 1395, 1397, 1400, 1403, 1406, 1409, 1412, 1415, 1418 or 1421 amino acids in length.

[0129] Optionally, the Factor VIII amino acid sequence may be around 1377, around 1378, around 1385, around 1386, around 1387, around 1389, around 1391 or around 1394 amino acids in length. Optionally, the Factor VIII amino acid sequence may be 1377, 1378, 1385, 1386, 1387, 1389, 1391 or 1394 amino acids in length. Optionally, the Factor VIII amino acid sequence may be 1394 amino acids in length.

[0130] The Factor VIII amino acid sequence may comprise at least 650, at least 700, at least 710, or 713 amino acids corresponding to positions 1 to 713 of SEQ ID NO: 1. The Factor VIII amino acid sequence may comprise all the amino acids corresponding to positions 1 to 713 of SEQ ID NO: 1. The Factor VIII amino acid sequence may comprise at least 550, at least 600, at least 620, or 636 amino acids corresponding to positions 1697 to 2332 of SEQ ID NO: 1. The Factor VIII amino acid sequence may comprise all the amino acids corresponding to positions 1697 to 2332 of SEQ ID NO: 1.

[0131] When a range of positions are provided, e.g. positions 1 to 713, the recited values are included. Therefore, in the example “positions 1 to 713 ”, 1 and 713 are included. Thus, the use of “to” is inclusive.

[0132] Optionally, the Factor VIII amino acid sequence does not comprise at least one amino acid(s) corresponding to positions 724 to 740 of SEQ ID NO: 1. Optionally, the Factor VIII amino acid sequence does not comprise at least 2, at least 3, at least 4, at least 5, at least 6, at least 7, at least 8, at least 9, at least 10, at least 11, at least 12, at least 13, at least 14, at least 15, at least 16, or 17 amino acids corresponding to positions 724 to 740 of SEQ ID NO: 1. Optionally, the Factor VIII amino acid sequence does not comprise 17 or fewer, 16 or fewer, 15 or fewer, 14 or fewer, 13 or fewer, 12 or fewer, 11 or fewer, 10 or fewer, 9 or fewer, 8 or fewer, 7 or fewer, 6 or fewer, 5 or fewer, 4 or fewer, 3 or fewer, or 2 or fewer amino acids corresponding to positions 724 to 740 of SEQ ID NO: 1. Optionally, the Factor VIII amino acid sequence does not comprise between 1 and 18, between 5 and 18, between 7 and 18, between 10 and 18, between 12 and 18, or between 15 and 18 amino acids corresponding to positions 724 to 740 of SEQ ID NO 1. Optionally, the Factor VIII amino acid sequence does not comprise between 2 and 18, between 5 and 16, or between 8 and 13 amino acids corresponding to positions 724 to 740 of SEQ ID NO: 1. Optionally, the Factor VIII amino acid sequence does not comprise between 2 and 16, between 2 and 13, between 2 and 10, or between 2 and 7 amino acids corresponding to positions 724 to 740 of SEQ ID NO: 1. Optionally, the Factor VIII amino acid sequence does not comprise at least 2 contiguous amino acids corresponding to positions 724 to 740 of SEQ ID NO: 1. Optionally, the Factor VIII amino acid sequence does not comprise at least 3, at least 4, at least 5, at least 6, at least 7, at least 8, at least 9, at least 10, at least 11, at least 12, at least 13, at least 14, at least 15, at least 16, or 17 contiguous amino acids corresponding to positions 724 to 740 of SEQ ID NO: 1. Optionally, the Factor VIII amino acid sequence does not comprise amino acids corresponding to positions 739 to 740, 738 to 740, 737 to 740, 736 to 740, 735 to 740, 734 to 740, 733 to 740, 732 to 740, 731 to 740, 730 to 740, 729 to 740, 728 to 740, 727 to 740, 726 to 740, 725 to 740, or 724 to 740 of SEQ ID NO: 1. Optionally, the Factor VIII amino acid sequence does not comprise amino acids corresponding to positions 738 to 740 of SEQ ID NO: 1. Optionally, the Factor VIII amino acid sequence does not comprise amino acids corresponding to positions 735 to 740 of SEQ ID NO: 1. Optionally, the Factor VIII amino acid sequence does not comprise amino acids corresponding to positions 732 to 740 of SEQ ID NO: 1. Optionally, the Factor VIII amino acid sequence does not comprise amino acids corresponding to positions 729 to 740 of SEQ ID NO: 1. Optionally, the Factor VIII amino acid sequence does not comprise amino acids corresponding to positions 726 to 740 of SEQ ID NO: 1. Optionally, the Factor VIII amino acid sequence does not comprise amino acids corresponding to positions 724 to 740 of SEQ ID NO: 1.

[0133] The Factor VIII amino acid sequence may comprise at least one amino acid(s) corresponding to positions 724 to 740 of SEQ ID NO: 1. The Factor VIII amino acid sequence may comprise at least 2, at least 3, at least 4, at least 5, at least 6, at least 7, at least 8, at least 9, at least 10, at least 11, at least 12, at least 13, at least 14, at least 15, at least 16, or 17 amino acids corresponding to positions 724 to 740 of SEQ ID NO: 1. The Factor VIII amino acid sequence may comprise 17 or fewer, 16 or fewer, 15 or fewer, 14 or fewer, 13 or fewer, 12 or fewer, 11 or fewer, 10 or fewer, 9 or fewer, 8 or fewer, 7 or fewer, 6 or fewer, 5 or fewer, 4 or fewer, 3 or fewer, or 2 or fewer amino acids corresponding to positions 724 to 740 of SEQ ID NO: 1. The Factor VIII amino acid sequence may comprise between 1 and 18, between 4 and 15, between 4 and 12, or between 4 and 9 amino acids corresponding to positions 724 to 740 of SEQ ID NO: 1.

[0134] The Factor VIII amino acid sequence may comprise at least 2 contiguous amino acids corresponding to positions 724 to 740 of SEQ ID NO: 1. The Factor VIII amino acid sequence may comprise at least 3, at least 4, at least 5, at least 6, at least 7, at least 8, at least 9, at least 10, at least 11, at least 12, at least 13, at least 14, at least 15, at least 16, or 17 contiguous amino acids corresponding to positions 724 to 740 of SEQ ID NO: 1. The Factor VIII amino acid sequence may comprise amino acids corresponding to positions 724 to 725, 724 to 726, 724 to 727, 724 to 728, 724 to 729, 724 to 730, 724 to 731, 724 to 732, 724 to 733, 724 to 734, 724 to 735, 724 to 736, 724 to 737, 724 to 738, 724 to 739, or 724 to 740 of SEQ ID NO: 1. The Factor VIII amino acid sequence may comprise amino acids corresponding to positions 724 to 725 of SEQ ID NO: 1. The Factor VIII amino acid sequence may comprise amino acids corresponding to positions 724 to 728 of SEQ ID NO: 1. The Factor VIII amino acid sequence may comprise amino acids corresponding to positions 724 to 731 of SEQ ID NO: 1. The Factor VIII amino acid sequence may comprise amino acids corresponding to positions 724 to 734 of SEQ ID NO: 1. The Factor VIII amino acid sequence may comprise amino acids corresponding to positions 724 to 737 of SEQ ID NO: 1. The Factor VIII amino acid sequence may comprise amino acids corresponding to positions 724 to 740 of SEQ ID NO: 1.

[0135] The Factor VIII amino acid sequence may comprise at least one of the tyrosine amino acids corresponding to positions 718, 719 and 723 of SEQ ID NO: 1. The Factor VIII amino acid sequence may comprise the tyrosine amino acid corresponding to position 718 of SEQ ID NO: 1. The Factor VIII amino acid sequence may comprise the tyrosine amino acid corresponding to position 719 of SEQ ID NO: 1. The Factor VIII amino acid sequence may comprise the tyrosine amino acid corresponding to position 723 of SEQ ID NO: 1. The Factor VIII amino acid sequence may comprise the tyrosine amino acids corresponding to positions 718, 719 and 723 of SEQ ID NO: 1.

[0136] The Factor VIII amino acid sequence may comprise at least one of the amino acid(s) corresponding to positions 714 to 723 of SEQ ID NO: 1. The Factor VIII amino acid sequence may comprise at least 2, at least 3, at least 4, at least 5, at least 6, at least 7, at least 8, at least 9, or 10 amino acids corresponding to positions 714 to 723 of SEQ ID NO: 1. The Factor VIII amino acid sequence may comprise 10 or fewer, 9 or fewer, 8 or fewer, 7 or fewer, 6 or fewer, 5 or fewer, 4 or fewer, 3 or fewer, or 2 or fewer amino acids corresponding to positions 714 to 723 of SEQ ID NO: 1. The Factor VIII amino acid sequence may comprise between 2 and 11, between 5 and 11, or between 7 and 11 amino acids corresponding to positions 714 to 723 of SEQ ID NO: 1. The Factor VIII amino acid sequence may comprise at least 2 contiguous amino acids corresponding to positions 714 to 723 of SEQ ID NO: 1. The Factor VIII amino acid sequence may comprise at least 3, at least 4, at least 5, at least 6, at least 7, at least 8, at least 9, or 10 contiguous amino acids corresponding to positions 714 to 723 of SEQ ID NO: 1. The Factor VIII amino acid sequence may comprise amino acids corresponding to positions 714 to 715, 714 to 716, 714 to 717, 714 to 718, 714 to 719, 714 to 720, 714 to 721, 714 to 722, or 714 to 723 of SEQ ID NO: 1. The Factor VIII amino acid sequence may comprise amino acids corresponding to positions 714 to 719 of SEQ ID NO: 1. The Factor VIII amino acid sequence may comprise amino acids corresponding to positions 714 to 722 of SEQ ID NO: 1. The Factor VIII amino acid sequence may comprise amino acids corresponding to positions 714 to 723 of SEQ ID NO: 1.

[0137] Optionally, the Factor VIII amino acid sequence does not comprise at least one amino acid(s) corresponding to positions 741 to 745 of SEQ ID NO: 1. Optionally, the Factor VIII amino acid sequence does not comprise at least 2, at least 3, at least 4, or 5 amino acids corresponding to positions 741 to 745 of SEQ ID NO: 1. Optionally, the Factor VIII amino acid sequence does not comprise 5 or fewer, 4 or fewer, 3 or fewer, or 2 or fewer amino acids corresponding to positions 741 to 745 of SEQ ID NO: 1. Optionally, the Factor VIII amino acid sequence does not comprise between 1 and 6, or between 3 and 6 amino acids corresponding to positions 741 to 745 of SEQ ID NO: 1. Optionally, the Factor VIII amino acid sequence does not comprise at least 2 contiguous amino acids corresponding to positions 741 to 745 of SEQ ID NO: 1. Optionally, the Factor VIII amino acid sequence does not comprise at least 3, at least 4, or 5 contiguous amino acids corresponding to positions 741 to 745 of SEQ ID NO: 1. Optionally, the Factor VIII amino acid sequence does not comprise amino acids corresponding to positions 744 to 745, 743 to 745, 742 to 745, or 741 to 745 of SEQ ID NO: 1. Optionally, the Factor VIII amino acid sequence does not comprise amino acids corresponding to positions 741 to 745 of SEQ ID NO: 1.

[0138] Optionally, the Factor VIII amino acid sequence does not comprise at least one amino acid(s) corresponding to positions 1640 to 1648 of SEQ ID NO: 1. Optionally, the Factor VIII amino acid sequence does not comprise at least 2, at least 3, at least 4, at least 5, at least 6, at least 7, at least 8, or 9 amino acids corresponding to positions 1640 to 1648 of SEQ ID NO: 1. Optionally, the Factor VIII amino acid sequence does not comprise 9 or fewer, 8 or fewer, 7 or fewer, 6 or fewer, 5 or fewer, 4 or fewer, 3 or fewer, or 2 or fewer amino acids corresponding to positions 1640 to 1648 of SEQ ID NO: 1. Optionally, the Factor VIII amino acid sequence does not comprise between 1 and 10, between 4 and 10, or between 6 and 10 amino acids corresponding to positions 1640 to 1648 of SEQ ID NO: 1. Optionally, the Factor VIII amino acid sequence does not comprise at least 2 contiguous amino acids corresponding to positions 1640 to 1648 of SEQ ID NO: 1. Optionally, the Factor VIII amino acid sequence does not comprise at least 3, at least 4, at least 5, at least 6, at least 7, at least 8, or 9 contiguous amino acids corresponding to positions 1640 to 1648 of SEQ ID NO: 1. Optionally, the Factor VIII amino acid sequence does not comprise amino acids corresponding to positions 1640 to 1641, 1640 to 1642, 1640 to 1643, 1640 to 1644, 1640 to 1645, 1640 to 1646, 1640 to 1647, or 1640 to 1648 of SEQ ID NO: 1. Optionally, the Factor VIII amino acid sequence does not comprise amino acids corresponding to positions 1640 to 1648 of SEQ ID NO: 1.

[0139] Optionally, the Factor VIII amino acid sequence does not comprise an amino acid sequence where the amino acid corresponding to position 1644 of SEQ ID NO: 1 is immediately juxtaposed to the amino acid corresponding to position 1649 of SEQ ID NO: 1. Thus, optionally, the amino acid sequence corresponding to positions 1645 to 1648 of SEQ ID NO: 1 is not absent (e.g. deleted) unless at least one further amino acid which is immediately juxtaposed to the amino acid sequence corresponding to positions 1645 to 1648 of SEQ ID NO: 1 (e.g. the amino acid sequence corresponding to position 1644 and/or 1649) is also absent (e.g. deleted).

[0140] Optionally, the Factor VIII amino acid sequence does not comprise different amino acids at positions corresponding to positions 1645 to 1648 of SEQ ID NO: 1. An amino acid is considered “different” if it is not identical to the amino acid in the corresponding position in a wild-type Factor VIII amino acid sequence, such as SEQ ID NO: 1. For example:
[0141] If the amino acid corresponding to position 1645 of SEQ ID NO: 1 is arginine, then it is not a different amino acid.
[0142] If the amino acid corresponding to position 1646 of SEQ ID NO: 1 is histidine, then it is not a different amino acid.
[0143] If the amino acid corresponding to position 1647 of SEQ ID NO: 1 is glutamine, then it is not a different amino acid.
[0144] If the amino acid corresponding to position 1648 of SEQ ID NO: 1 is arginine, then it is not a different amino acid.

[0145] The Factor VIII amino acid sequence may comprise amino acids corresponding to positions 1645 to 1648 of SEQ ID NO: 1. Preferably, when the Factor VIII amino acid sequence comprises amino acids corresponding to positions 1645 to 1648 of SEQ ID NO: 1:
[0146] the amino acid at the position corresponding to position 1645 of SEQ ID NO: 1 is arginine;
[0147] the amino acid at the position corresponding to position 1646 of SEQ ID NO: 1 is histidine;
[0148] the amino acid at the position corresponding to position 1647 of SEQ ID NO: 1 is glutamine; and
[0149] the amino acid at the position corresponding to position 1648 of SEQ ID NO: 1 is arginine.

[0150] Optionally, the Factor VIII amino acid sequence may comprise at least one amino acid(s) corresponding to positions 741 to 745 of SEQ ID NO:1. Optionally, the Factor VIII amino acid sequence may comprise at least 2, at least 3, at least 4 or 5 amino acids corresponding to positions 741 to 745 of SEQ ID NO:1. Optionally, the Factor VIII amino acid sequence may comprise 5 or fewer, 4 or fewer, 3 or fewer or 2 or fewer amino acids corresponding to positions 741 to 745 of SEQ ID NO:1. Optionally, the Factor VIII amino acid sequence may comprise between 1 and 6, or between 3 and 6 amino acids corresponding to positions 741 to 745 of SEQ ID NO:1. Optionally, the Factor VIII amino acid sequence may comprise at least 2 contiguous amino acids corresponding to positions 741 to 745 of SEQ ID NO:1. Optionally, the Factor VIII amino acid sequence does not comprise at least 3, at least 4 or 5 contiguous amino acids corresponding to positions 741 to 745 of SEQ ID NO:1. Optionally, the Factor VIII amino acid sequence may comprise amino acids corresponding to positions 741, 741 to 742, 741 to 743, 741 to 744, or 741 to 745 of SEQ ID NO:1. Optionally, the Factor VIII amino acid sequence may comprise amino acids corresponding to positions 741 to 745 of SEQ ID NO:1.

[0151] Optionally, the Factor VIII amino acid sequence may comprise at least one amino acid(s) corresponding to positions 1640 to 1648 of SEQ ID NO:1. Optionally, the Factor VIII amino acid sequence may comprise at least 2, at least 3, at least 4, at least 5, at least 6, at least 7, at least 8 or 9 amino acids corresponding to positions 1640 to 1648 of SEQ ID NO:1. Optionally, the Factor VIII amino acid sequence may comprise 9 or fewer, 8 or fewer, 7 or fewer, 6 or fewer, 5 or fewer, 4 or fewer, 3 or fewer or 2 or fewer amino acids corresponding to positions 1640 to 1648 of SEQ ID NO:1. Optionally, the Factor VIII amino acid sequence may comprise between 1 and 10, between 4 and 10 or between 6 and 10 amino acids corresponding to positions 1640 to 1648 of SEQ ID NO:1. Optionally, the Factor VIII amino acid sequence may comprise at least 2 contiguous amino acids corresponding to positions 1640 to 1648 of SEQ ID NO:1. Optionally, the Factor VIII amino acid sequence may comprise at least 3, at least 4, at least 5, at least 6, at least 7, at least 8 or 9 contiguous amino acids corresponding to positions 1640 to 1648 of SEQ ID NO:1. Optionally, the Factor VIII amino acid sequence may comprise amino acids corresponding to positions 1640 to 1648, 1641 to 1648, 1642 to 1648, 1643 to 1648, 1644 to 1648, 1645 to 1648, 1646 to 1648, 1647 to 1648, or 1648 of SEQ ID NO:1. Optionally, the Factor VIII amino acid sequence may comprise amino acids corresponding to positions 1640 to 1648 of SEQ ID NO:1.

[0152] Optionally, the Factor VIII amino acid sequence may comprise at least one amino acid(s) corresponding to positions 741 to 745 and 1640 to 1648 of SEQ ID NO:1. Optionally, the Factor VIII amino acid sequence may comprise at least 2, at least 3, at least 4, at least 5, at least 6, at least 7, at least 8, at least 9, at least 10, at least 11, at least 12, at least 13 or 14 amino acids corresponding to positions 741 to 745 and 1640 to 1648 of SEQ ID NO:1.

[0153] Optionally, the Factor VIII amino acid sequence may comprise 14 or fewer, 13 or fewer, 12 or fewer, 11 or fewer, 10 or fewer, 9 or fewer, 8 or fewer, 7 or fewer, 6 or fewer, 5 or fewer, 4 or fewer, 3 or fewer or 2 or fewer amino acids corresponding to positions 741 to 745 and 1640 to 1648 of SEQ ID NO:1. Optionally, the Factor VIII amino acid sequence may comprise between 1 and 15, between 4 and 15, between 7 and 15 or between 10 and 15 amino acids corresponding to positions 741 to 745 and 1640 to 1648 of SEQ ID NO:1. Optionally, the Factor VIII amino acid sequence may comprise at least 2 contiguous amino acids corresponding to positions 741 to 745 and 1640 to 1648 of SEQ ID NO:1. Optionally, the Factor VIII amino acid sequence may comprise at least 3, at least 4, at least 5, at least 6, at least 7, at least 8, at least 9, at least 10, at least 11, at least 12, at least 13 or 14 contiguous amino acids corresponding to positions 741 to 745 and 1640 to 1648 of SEQ ID NO:1. Optionally, the Factor VIII amino acid sequence may comprise amino acids corresponding to positions 741, 741 to 742, 741 to 743, 741 to 744, or 741 to 745 and/or amino acids corresponding to positions 1640 to 1648, 1641 to 1648, 1642 to 1648, 1643 to 1648, 1644 to 1648, 1645 to 1648, 1646 to 1648, 1647 to 1648, or 1648 of SEQ ID NO:1. Optionally, the Factor VIII amino acid sequence may comprise amino acids corresponding to positions 741 to 745 and 1640 to 1648 of SEQ ID NO:1. Optionally, the Factor VIII amino acid sequence may comprise the SQ linker sequence SFSQNPPVLKRHQR.

[0154] Optionally, the Factor VIII amino acid sequence does not comprise at least one amino acid(s) corresponding to positions 1649 to 1689 of SEQ ID NO:1. Optionally the Factor VIII amino acid sequence does not comprise at least 2, at least 3, at least 4, at least 5, at least 6, at least 7, at least 8, at least 9, at least 10, at least 11, at least 12, at least 13, at least 14, at least 15, at least 16, at least 17, at least 18, at least 19, at least 20, at least 21, at least 22, at least 23, at least 24, at least 25, at least 26, at least 27, at least 28, at least 29, at least 30, at least 31, at least 32, at least 33, at least 34, at least 35, at least 36, at least 37, at least 38, at least 39, at least 40 or 41 amino acids corresponding to positions 1649 to 1689 of SEQ ID NO:1. Optionally, the Factor VIII amino acid sequence does not comprise 41 or fewer, 40 or fewer, 39 or fewer, 38 or fewer, 37 or fewer, 36 or fewer, 35 or fewer, 34 or fewer, 33 or fewer, 32 or fewer, 31 or fewer, 30 or fewer, 29 or fewer, 28 or fewer, 27 or fewer, 26 or fewer, 25 or fewer, 24 or fewer, 23 or fewer, 22 or fewer, 21 or fewer, 20 or fewer, 19 or fewer, 18 or fewer, 17 or fewer, 16 or fewer, 15 or fewer, 14 or fewer, 13 or fewer, 12 or fewer, 11 or fewer, 10 or fewer, 9 or fewer, 8 or fewer, 7 or fewer, 6 or fewer, 5 or fewer, 4 or fewer, 3 or fewer, 2 or fewer amino acids corresponding to positions 1649 to 1689 of SEQ ID NO:1. Optionally, the Factor VIII amino acid sequence does not comprise between 1 and 42, between 5 and 42, between 8 and 42, between 11 and 42, between 14 and 42, between 17 and 42, between 20 and 42, between 23 and 42, between 26 and 42, between 29 and 42, between 32 and 42, between 35 and 42 or between 39 and 42 amino acids corresponding to positions 1649 to 1689 of SEQ ID NO:1. Optionally, the Factor VIII amino acid sequence does not comprise at least 2 contiguous amino acids corresponding to positions 1649 to 1689 of SEQ ID NO:1. Optionally, the Factor VIII amino acid sequence does not comprise at least 2, at least 3, at least 4, at least 5, at least 6, at least 7, at least 8, at least 9, at least 10, at least 11, at least 12, at least 13, at least 14, at least 15, at least 16, at least 17, at least 18, at least 19, at least 20, at least 21, at least 22, at least 23, at least 24, at least 25, at least 26, at least 27, at least 28, at least 29, at least 30, at least 31, at least 32, at least 33, at least 34, at least 35, at least 36, at least 37, at least 38, at least 39, at least 40 or 41 contiguous amino acids corresponding to positions 1649 to 1689 of SEQ ID NO:1. Optionally, the Factor VIII amino acid sequence does not comprise amino acids corresponding to positions 1649 to 1670, 1649 to 1671, 1649 to 1672, 1649 to 1673, 1649 to 1674, 1649 to 1675, 1649 to 1676, 1649 to 1677, 1649 to 1678, 1649 to 1679, 1649 to 1680, 1649 to 1681, 1649 to 1682, 1649 to 1683, 1649 to 1684, 1649 to 1685, 1649 to 1686, 1649 to 1687, 1649 to 1688 or 1649 to 1689 of SEQ ID NO: 1. Optionally the Factor VIII amino acid sequence does not comprise amino acids corresponding to positions 1649 to 1670 of SEQ ID NO: 1. Optionally the Factor VIII amino acid sequence does not comprise amino acids corresponding to positions 1649 to 1673 of SEQ ID NO: 1. Optionally the Factor VIII amino acid sequence does not comprise amino acids corresponding to positions 1649 to 1676 of SEQ ID NO: 1. Optionally the Factor VIII amino acid sequence does not comprise amino acids corresponding to positions 1649 to 1679 of SEQ ID NO: 1. Optionally the Factor VIII amino acid sequence does not comprise amino acids corresponding to positions 1649 to 1682 of SEQ ID NO: 1. Optionally the Factor VIII amino acid sequence does not comprise amino acids corresponding to positions 1649 to 1685 of SEQ ID NO: 1. Optionally the Factor VIII amino acid sequence does not comprise amino acids corresponding to positions 1649 to 1686 of SEQ ID NO: 1. Optionally the Factor VIII amino acid sequence does not comprise amino acids corresponding to positions 1649 to 1687 of SEQ ID NO: 1. Optionally the Factor VIII amino acid sequence does not comprise amino acids corresponding to positions 1649 to 1688 of SEQ ID NO: 1. Optionally the Factor VIII amino acid sequence does not comprise amino acids corresponding to positions 1649 to 1689 of SEQ ID NO: 1.

[0155] Optionally, the Factor VIII amino acid sequence does not comprise at least one amino acid(s) corresponding to positions 1649 to 1669 of SEQ ID NO: 1. Optionally, the Factor VIII amino acid sequence does not comprise at least 2, at least 3, at least 4, at least 5, at least 6, at least 7, at least 8, at least 9, at least 10, at least 11, at least 12, at least 13, at least 14, at least 15, at least 16, at least 17, at least 18, at least 19, at least 20, or 21 amino acids corresponding to positions 1649 to 1669 of SEQ ID NO: 1. Optionally, the Factor VIII amino acid sequence does not comprise 21 or fewer, 20 or fewer, 19 or fewer, 18 or fewer, 17 or fewer, 16 or fewer, 15 or fewer, 14 or fewer, 13 or fewer, 12 or fewer, 11 or fewer, 10 or fewer, 9 or fewer, 8 or fewer, 7 or fewer, 6 or fewer, 5 or fewer, 4 or fewer, 3 or fewer, or 2 or fewer amino acids corresponding to positions 1649 to 1669 of SEQ ID NO: 1. Optionally, the Factor VIII amino acid sequence does not comprise between 1 and 22, between 5 and 22, between 8 and 22, between 11 and 22, between 14 and 22, between 17 and 22, or between 19 and 22 amino acids corresponding to positions 1649 to 1669 of SEQ ID NO: 1. Optionally, the Factor VIII amino acid sequence does not comprise at least 2 contiguous amino acids corresponding to positions 1649 to 1669 of SEQ ID NO: 1. Optionally, the Factor VIII amino acid sequence does not comprise at least 3, at least 4, at least 5, at least 6, at least 7, at least 8, at least 9, at least 10, at least 11, at least 12, at least 13, at least 14, at least 15, at least 16, at least 17, at least 18, at least 19, at least 20, or 21 contiguous amino acids corresponding to positions 1649 to 1669 of SEQ ID NO: 1. Optionally, the Factor VIII amino acid sequence does not comprise amino acids corresponding to positions 1649 to 1650, 1649 to 1651, 1649 to 1652, 1649 to 1653, 1649 to 1654, 1649 to 1655, 1649 to 1656, 1649 to 1657, 1649 to 1658, 1649 to 1659, 1649 to 1660, 1649 to 1661, 1649 to 1662, 1649 to 1663, 1649 to 1664, 1649 to 1665, 1649 to 1666, 1649 to 1667, 1649 to 1668, or 1649 to 1669 of SEQ ID NO: 1. Optionally, the Factor VIII amino acid sequence does not comprise amino acids corresponding to positions 1649 to 1651 of SEQ ID NO: 1. Optionally, the Factor VIII amino acid sequence does not comprise amino acids corresponding to positions 1649 to 1654 of SEQ ID NO: 1. Optionally, the Factor VIII amino acid sequence does not comprise amino acids corresponding to positions 1649 to 1657 of SEQ ID NO: 1. Optionally, the Factor VIII amino acid sequence does not comprise amino acids corresponding to positions 1649 to 1660 of SEQ ID NO: 1. Optionally, the Factor VIII amino acid sequence does not comprise amino acids corresponding to positions 1649 to 1663 of SEQ ID NO: 1. Optionally, the Factor VIII amino acid sequence does not comprise amino acids corresponding to positions 1649 to 1664 of SEQ ID NO: 1. Optionally, the Factor VIII amino acid sequence does not comprise amino acids corresponding to positions 1649 to 1666 of SEQ ID NO: 1. Optionally, the Factor VIII amino acid sequence does not comprise amino acids corresponding to positions 1649 to 1667 of SEQ ID NO: 1. Optionally, the Factor VIII amino acid sequence does not comprise amino acids corresponding to positions 1649 to 1669 of SEQ ID NO: 1.

[0156] The Factor VIII amino acid sequence may comprise at least one of the amino acid(s) corresponding to positions 1649 to 1689 of SEQ ID NO:1. The Factor VIII amino acid sequence may comprise at least 2, at least 3, at least 4, at least 5, at least 6, at least 7, at least 8, at least 9, at least 10, at least 11, at least 12, at least 13, at least 14, at least 15, at least 16, at least 17, at least 18, at least 19, at least 20, at least 21, at least 22, at least 23, at least 24, at least 25, at least 26, at least 27, at least 28, at least 29, at least 30, at least 31, at least 32, at least 33, at least 34, at least 35, at least 36, at least 37, at least 38, at least 39, at least 40 or 41 of the amino acids corresponding to positions 1649 to 1689 of SEQ ID NO:1. The FVIII amino acid sequence may comprise 41 or fewer, 40 or fewer, 39 or fewer, 38 or fewer, 37 or fewer, 36 or fewer, 35 or fewer, 34 or fewer, 33 or fewer, 32 or fewer, 31 or fewer, 30 or fewer, 29 or fewer, 28 or fewer, 27 or fewer, 26 or fewer, 25 or fewer, 24 or fewer, 23 or fewer, 22 or fewer, 21 or fewer, 20 or fewer, 19 or fewer, 18 or fewer, 17 or fewer, 16 or fewer, 15 or fewer, 14 or fewer, 13 or fewer, 12 or fewer, 11 or fewer, 10 or fewer, 9 or fewer, 8 or fewer, 7 or fewer, 6 or fewer, 5 or fewer, 4 or fewer, 3 or fewer, 2 or fewer amino acids corresponding to positions 1649 to 1689 of SEQ ID NO:1. The FVIII amino acid sequence may comprise between 1 and 42, between 1 and 39, between 1 and 36, between 1 and 33, between 1 and 30, between 1 and 27, between 1 and 24, between 1 and 21, between 1 and 18, between 1 and 15, between 1 and 12, between 1 and 9, between 1 and 6, or between 1 and 4 amino acids corresponding to positions 1649 to 1689. The Factor VIII amino acid sequence may comprise at least 2 contiguous amino acids corresponding to positions 1649 to 1689 of SEQ ID NO:1. The Factor VIII amino acid sequence may comprise at least 2, at least 3, at least 4, at least 5, at least 6, at least 7, at least 8, at least 9, at least 10, at least 11, at least 12, at least 13, at least 14, at least 15, at least 16, at least 17, at least 18, at least 19, at least 20, at least 21, at least 22, at least 23, at least 24, at least 25, at least 26, at least 27, at least 28, at least 29, at least 30, at least 31, at least 32, at least 33, at least 34, at least 35, at least 36, at least 37, at least 38, at least 39, at least 40 or 41 contiguous amino acids corresponding to positions 1649 to 1689 of SEQ ID NO:1. The Factor VIII amino acid sequence may comprise amino acids corresponding to positions 1688 to 1689, 1687 to 1689, 1686 to 1689, 1685 to 1689, 1684 to 1689, 1683 to 1689, 1682 to 1689, 1681 to 1689, 1680 to 1689, 1679 to 1689, 1678 to 1689, 1677 to 1689, 1676 to 1689, 1675 to 1698, 1674 to 1689, 1673 to 1689, 1672 to 1689, 1671 to 1689 or 1670 to 1689 of SEQ ID NO:1. The Factor VIII amino acid sequence may comprise amino acids corresponding to positions 1673 to 1689 of SEQ ID NO:1. The Factor VIII amino acid sequence may comprise amino acids corresponding to positions 1670 to 1689 of SEQ ID NO:1. The Factor VIII amino acid sequence may comprise amino acids corresponding to positions 1649 to 1689 of SEQ ID NO:1.

[0157] The Factor VIII amino acid sequence may comprise at least one of the amino acid(s) corresponding to positions 1649 to 1669 of SEQ ID NO: 1. The Factor VIII amino acid sequence may comprise at least 2, at least 3, at least 4, at least 5, at least 6, at least 7, at least 8, at least 9, at least 10, at least 11, at least 12, at least 13, at least 14, at least 15, at least 16, at least 17, at least 18, at least 19, at least 20, or 21 amino acids corresponding to positions 1649 to 1669 of SEQ ID NO: 1. The Factor VIII amino acid sequence may comprise 21 or fewer, 20 or fewer, 19 or fewer, 18 or fewer, 17 or fewer, 16 or fewer, 15 or fewer, 14 or fewer, 13 or fewer, 12 or fewer, 11 or fewer, 10 or fewer, 9 or fewer, 8 or fewer, 7 or fewer, 6 or fewer, 5 or fewer, 4 or fewer, 3 or fewer, or 2 or fewer amino acids corresponding to positions 1649 to 1669 of SEQ ID NO: 1. The Factor VIII amino acid sequence may comprise between 1 and 22, between 1 and 19, between 1 and 16, between 1 and 12, between 1 and 9, between 1 and 6, or between 1 and 4 amino acids corresponding to positions 1649 to 1669 of SEQ ID NO: 1. The Factor VIII amino acid sequence may comprise at least 2 contiguous amino acids corresponding to positions 1649 to 1669 of SEQ ID NO: 1. The Factor VIII amino acid sequence may comprise at least 3, at least 4, at least 5, at least 6, at least 7, at least 8, at least 9, at least 10, at least 11, at least 12, at least 13, at least 14, at least 15, at least 16, at least 17, at least 18, at least 19, at least 20, or 21 contiguous amino acids corresponding to positions 1649 to 1669 of SEQ ID NO: 1. The Factor VIII amino acid sequence may comprise amino acids corresponding to positions 1668 to 1669, 1667 to 1669, 1666 to 1669, 1665 to 1669, 1664 to 1669, 1663 to 1669, 1662 to 1669, 1661 to 1669, 1660 to 1669, 1659 to 1669, 1658 to 1669, 1657 to 1669, 1656 to 1669, 1655 to 1669, 1654 to 1669, 1653 to 1669, 1652 to 1669, 1651 to 1669, 1650 to 1669, or 1649 to 1669 of SEQ ID NO: 1. The Factor VIII amino acid sequence may comprise an amino acid corresponding to position 1664 of SEQ ID NO: 1. Preferably, the amino acid corresponding to position 1664 of SEQ ID NO: 1 is a tyrosine. The Factor VIII amino acid sequence may comprise amino acids corresponding to positions 1668 and/or 1669 of SEQ ID NO: 1. The Factor VIII amino acid sequence may comprise amino acids corresponding to positions 1668 to 1669 of SEQ ID NO: 1. The Factor VIII amino acid sequence may comprise amino acids corresponding to positions 1667 to 1669 of SEQ ID NO: 1. The Factor VIII amino acid sequence may comprise amino acids corresponding to positions 1664 to 1669 of SEQ ID NO: 1. The Factor VIII amino acid sequence may comprise amino acids corresponding to positions 1661 to 1669 of SEQ ID NO: 1. The Factor VIII amino acid sequence may comprise amino acids corresponding to positions 1658 to 1669 of SEQ ID NO: 1. The Factor VIII amino acid sequence may comprise amino acids corresponding to positions 1655 to 1669 of SEQ ID NO: 1. The Factor VIII amino acid sequence may comprise amino acids corresponding to positions 1652 to 1669 of SEQ ID NO: 1. The Factor VIII amino acid sequence may comprise amino acids corresponding to positions 1649 to 1669 of SEQ ID NO: 1.

[0158] The Factor VIII amino acid sequence may comprise at least one amino acid(s) corresponding to positions 1668 to 1678 of SEQ ID NO: 1. The Factor VIII amino acid sequence may comprise at least 2, at least 3, at least 4, at least 5, at least 6, at least 7, at least 8, at least 9, at least 10 or 11 amino acids corresponding to positions 1668 to 1678 of SEQ ID NO: 1. The

[0159] Factor VIII amino acid sequence may comprise 11 or fewer, 10 or fewer, 9 or fewer, 8 or fewer, 7 or fewer, 6 or fewer, 5 or fewer, 4 or fewer, 3 or fewer, or 2 or fewer amino acids corresponding to positions 1668 to 1678 of SEQ ID NO: 1. The Factor VIII amino acid sequence may comprise between 1 and 12, between 4 and 12, or between 7 and 12 amino acids corresponding to positions 1668 to 1678 of SEQ ID NO: 1. The Factor VIII amino acid sequence may comprise at least 2 contiguous amino acids corresponding to positions 1668 to 1678 of SEQ ID NO: 1. The Factor VIII amino acid sequence may comprise at least 3, at least 4, at least 5, at least 6, at least 7, at least 8, at least 9, at least 10, or 11 contiguous amino acids corresponding to positions 1668 to 1678 of SEQ ID NO: 1. The Factor VIII amino acid sequence may comprise amino acids corresponding to positions 1668 to 1678 of SEQ ID NO:1. The Factor VIII amino acid sequence may comprise amino acids corresponding to positions 1670 to 1678 of SEQ ID NO: 1. The Factor VIII amino acid sequence may comprise amino acids corresponding to positions 1673 to 1678 of SEQ ID NO:1. The Factor VIII polypeptide comprising the Factor VIII amino acid sequence may bind to a von Willebrand factor. The Factor VIII amino acid sequence may comprise a von Willebrand factor binding site. The binding of a von Willebrand factor can be measured by an ELISA assay. Optionally, the Factor VIII amino acid sequence comprises a von Willebrand factor binding site if it can bind to a von Willebrand factor as measured by ELISA. An exemplary assay for measuring binding of a von Willebrand factor to FVIII is as follows.

[0160] An antibody against von Willebrand factor (e.g. a rabbit anti-human von Willebrand factor antibody) may be immobilised in wells of a multi-well plate. Von Willebrand factor may be added to the wells of the multi-well plate and incubated to allow binding of von Willebrand factor to the immobilised antibodies. Unbound von Willebrand factor may be removed by washing. Factor VIII may be added to the wells of the multi-well plate and incubated to allow binding of Factor VIII to von Willebrand factor. Unbound Factor VIII may be removed by washing. Binding of Factor VIII to von Willebrand factor may be measured using an antibody against Factor VIII conjugated to peroxidase (e.g. a peroxidase-conjugated sheep-anti-human FVIII antibody) in a chromogenic assay (e.g. using tetramethylbenzidine dihydrochloride (TMB) as a chromogenic substrate). Peroxidase catalyses the conversion of TMB to a blue product which may be detected spectrophotometrically as described elsewhere herein. The level of the blue product is proportional to the amount of detection antibody that remained after the washing step, which is proportional to the amount of the Factor VIII polypeptide bound to von Willebrand factor. A standard curve may be employed using a serial dilution of a standard human plasma (SHP) standard. Optionally an assay to measure the binding of von Willebrand factor to Factor VIII may be performed in conjunction with an assay to determine the amount of von Willebrand factor present in a sample. This may be performed by immobilising von Willebrand factor as outlined above, and using an antibody against von Willebrand factor conjugated to peroxidase (e.g. a peroxidase-conjugated rabbit anti-human von Willebrand factor antibody) in a chromogenic assay.

[0161] The Factor VIII amino acid sequence may comprise an amino acid corresponding to position 1679 of SEQ ID NO: 1. The Factor VIII amino acid sequence may comprise an amino acid corresponding to position 1680 of SEQ ID NO: 1. Preferably the amino acid corresponding to position 1680 of SEQ ID NO: 1 is a tyrosine. The Factor VIII amino acid sequence may comprise amino acids corresponding to positions 1679 and 1680 of SEQ ID NO: 1. Preferably the amino acid corresponding to position 1680 is a tyrosine. Optionally, the Factor VIII amino acid sequence does not comprise an amino acid corresponding to position 1679 of SEQ ID NO: 1. Optionally, the Factor VIII amino acid sequence does not comprise an amino acid corresponding to position 1680 of SEQ ID NO: 1. Optionally, the Factor VIII amino acid sequence does not comprise amino acids corresponding to positions 1679 and 1680 of SEQ ID NO: 1.

[0162] Optionally, the Factor VIII amino acid sequence does not comprise at least one amino acid(s) corresponding to positions 1681 to 1689 of SEQ ID NO: 1. Optionally, the Factor VIII amino acid sequence does not comprise at least 2, at least 3, at least 4, at least 5, at least 6, at least 7, at least 8, or 9 amino acids corresponding to positions 1681 to 1689 of SEQ ID NO: 1. Optionally, the Factor VIII amino acid sequence does not comprise 9 or fewer, 8 or fewer, 7 or fewer, 6 or fewer, 5 or fewer, 4 or fewer, 3 or fewer, or 2 or fewer amino acids corresponding to positions 1681 to 1689 of SEQ ID NO: 1. Optionally, the Factor VIII amino acid sequence does not comprise between 1 and 10, between 4 and 10, or between 6 and 10 amino acids corresponding to positions 1681 to 1689 of SEQ ID NO: 1. Optionally, the Factor VIII amino acid sequence does not comprise at least 2 contiguous amino acids corresponding to positions 1681 to 1689 of SEQ ID NO: 1. Optionally, the Factor VIII amino acid sequence does not comprise at least 3, at least 4, at least 5, at least 6, at least 7, at least 8, or 9 contiguous amino acids corresponding to positions 1681 to 1689 of SEQ ID NO: 1. Optionally, the Factor VIII amino acid sequence does not comprise amino acids corresponding to positions 1681 to 1682, 1681 to 1683, 1681 to 1684, 1681 to 1685, 1681 to 1686, 1681 to 1687, 1681 to 1688, or 1681 to 1689 of SEQ ID NO: 1. Optionally, the Factor VIII amino acid sequence does not comprise amino acids corresponding to positions 1681 to 1683 of SEQ ID NO: 1. Optionally, the Factor VIII amino acid sequence does not comprise amino acids corresponding to positions 1681 to 1686 of SEQ ID NO: 1. Optionally, the Factor VIII amino acid sequence does not comprise amino acids corresponding to positions 1681 to 1688 of SEQ ID NO: 1. Optionally, the Factor VIII amino acid sequence does not comprise amino acids corresponding to positions 1681 to 1689 of SEQ ID NO: 1.

[0163] The Factor VIII amino acid sequence may comprise at least one of the amino acid(s) corresponding to positions 1681 to 1689 of SEQ ID NO: 1. The Factor VIII amino acid sequence may comprise at least 2, at least 3, at least 4, at least 5, at least 6, at least 7, at least 8, or 9 amino acids corresponding to positions 1681 to 1689 of SEQ ID NO: 1. The Factor VIII amino acid sequence may comprise 9 or fewer, 8 or fewer, 7 or fewer, 6 or fewer, 5 or fewer, 4 or fewer, 3 or fewer, or 2 or fewer amino acids corresponding to positions 1681 to 1689 of SEQ ID NO: 1. The Factor VIII amino acid sequence may comprise between 1 and 10, between 4 and 10, or between 6 and 10 amino acids corresponding to positions 1681 to 1689 of SEQ ID NO: 1. The Factor VIII amino acid sequence may comprise between 1 and 10, between 1 and 8, or between 1 and 5 amino acids corresponding to positions 1681 to 1689 of SEQ ID NO: 1. The Factor VIII amino acid sequence may comprise at least 2 contiguous amino acids corresponding to positions 1681 to 1689 of SEQ ID NO: 1. The Factor VIII amino acid sequence may comprise at least 3, at least 4, at least 5, at least 6, at least 7, at least 8, or 9 contiguous amino acids corresponding to positions 1681 to 1689 of SEQ ID NO: 1. The Factor VIII amino acid sequence may comprise amino acids corresponding to positions 1688 to 1689, 1687 to 1689, 1686 to 1689, 1685 to 1689, 1684 to 1689, 1683 to 1689, 1682 to 1689, or 1681 to 1689 of SEQ ID NO: 1. The Factor VIII amino acid sequence may comprise an amino acid corresponding to position 1689 of SEQ ID NO: 1. The Factor VIII amino acid sequence may comprise amino acids corresponding to positions 1687 to 1689 of SEQ ID NO: 1. The Factor VIII amino acid sequence may comprise amino acids corresponding to positions 1684 to 1689 of SEQ ID NO: 1. The Factor VIII amino acid sequence may comprise amino acids corresponding to positions 1681 to 1689 of SEQ ID NO: 1.

[0164] The Factor VIII amino acid sequence may comprise at least one of the amino acid(s) corresponding to positions 1690 to 1696 of SEQ ID NO: 1. The Factor VIII amino acid sequence may comprise at least 2, at least 3, at least 4, at least 5, at least 6, or 7 amino acids corresponding to positions 1690 to 1696 of SEQ ID NO: 1. The Factor VIII amino acid sequence may comprise 7 or fewer, 6 or fewer, 5 or fewer, 4 or fewer, 3 or fewer, or 2 or fewer amino acids corresponding to positions 1690 to 1696 of SEQ ID NO: 1. The Factor VIII amino acid sequence may comprise between 2 and 8, or between 5 and 8 amino acids corresponding to positions 1690 to 1696 of SEQ ID NO: 1. The Factor VIII amino acid sequence may comprise at least 2 contiguous amino acids corresponding to positions 1690 to 1696 of SEQ ID NO: 1. The Factor VIII amino acid sequence may comprise at least 3, at least 4, at least 5, at least 6, or 7 contiguous amino acids corresponding to positions 1690 to 1696 of SEQ ID NO: 1. The Factor VIII amino acid sequence may comprise amino acids corresponding to positions 1695 to 1696, 1694 to 1696, 1693 to 1696, 1692 to 1696, 1691 to 1696, or 1690 to 1696 of SEQ ID NO: 1. The Factor VIII amino acid sequence may comprise amino acids corresponding to positions 1690 to 1696 of SEQ ID NO: 1.

[0165] Optionally, the Factor VIII amino acid sequence does not comprise amino acids corresponding to positions 741 to 1669 of SEQ ID NO: 1. Optionally, the Factor VIII amino acid sequence does not comprise amino acids corresponding to positions 741 to 1669 of SEQ ID NO: 1, and the Factor VIII amino acid sequence comprises amino acids corresponding to positions 724 to 740 of SEQ ID NO: 1. Optionally, the Factor VIII amino acid sequence does not comprise amino acids corresponding to positions 741 to 1669 of SEQ ID NO: 1, and the Factor VIII amino acid sequence comprises amino acids corresponding to positions 714 to 740 of SEQ ID NO: 1. Optionally, the Factor VIII amino acid sequence does not comprise amino acids corresponding to positions 741 to 1669 of SEQ ID NO: 1, and the Factor VIII amino acid sequence comprises amino acids corresponding to positions 1670 to 1689 of SEQ ID NO: 1. Optionally, the Factor VIII amino acid sequence does not comprise amino acids corresponding to positions 741 to 1669 of SEQ ID NO: 1, and the Factor VIII amino acid sequence comprises amino acids corresponding to positions 1670 to 1696 of SEQ ID NO: 1. Optionally, the Factor VIII amino acid sequence does not comprise amino acids corresponding to positions 741 to 1669 of SEQ ID NO: 1, and the Factor VIII amino acid sequence comprises amino acids corresponding to positions 724 to 740 and 1670 to 1689 of SEQ ID NO: 1. Optionally, the Factor VIII amino acid sequence does not comprise amino acids corresponding to positions 741 to 1669 of SEQ ID NO: 1, and the Factor VIII amino acid sequence comprises amino acids corresponding to positions 724 to 740 and 1670 to 1689 of SEQ ID NO: 1 and the tyrosine amino acids corresponding to positions 718, 719 and 723 of SEQ ID NO: 1. Optionally, the Factor VIII amino acid sequence does not comprise amino acids corresponding to positions 741 to 1669 of SEQ ID NO: 1, and the Factor VIII amino acid sequence comprises amino acids corresponding to positions 714 to 740 and 1670 to 1689 of SEQ ID NO: 1. Optionally, the Factor VIII amino acid sequence does not comprise amino acids corresponding to positions 741 to 1669 of SEQ ID NO: 1, and the Factor VIII amino acid sequence comprises amino acids corresponding to positions 714 to 740 and 1670 to 1696 of SEQ ID NO: 1. Optionally, the Factor VIII amino acid sequence does not comprise amino acids corresponding to positions 741 to 1669 of SEQ ID NO: 1, and the Factor VIII amino acid sequence comprises amino acids corresponding to positions 1 to 740 and 1670 to 2332 of SEQ ID NO: 1. The Factor VIII amino acid sequence may comprise SEQ ID NO: 9. The Factor VIII amino acid sequence may be SEQ ID NO: 9.

[0166] Optionally, the Factor VIII amino acid sequence does not comprise amino acids corresponding to positions 732 to 1669 of SEQ ID NO: 1. Optionally, the Factor VIII amino acid sequence does not comprise amino acids corresponding to positions 732 to 1669 of SEQ ID NO: 1, and the Factor VIII amino acid sequence comprises amino acids corresponding to positions 724 to 731 of SEQ ID NO: 1. Optionally, the Factor VIII amino acid sequence does not comprise amino acids corresponding to positions 732 to 1669 of SEQ ID NO: 1, and the Factor VIII amino acid sequence comprises amino acids corresponding to positions 714 to 731 of SEQ ID NO: 1. Optionally, the Factor VIII amino acid sequence does not comprise amino acids corresponding to positions 732 to 1669 of SEQ ID NO: 1, and the Factor VIII amino acid sequence comprises amino acids corresponding to positions 1670 to 1689 of SEQ ID NO: 1. Optionally, the Factor VIII amino acid sequence does not comprise amino acids corresponding to positions 732 to 1669 of SEQ ID NO: 1, and the Factor VIII amino acid sequence comprises amino acids corresponding to positions 1670 to 1696 of SEQ ID NO: 1. Optionally, the Factor VIII amino acid sequence does not comprise amino acids corresponding to positions 732 to 1669 of SEQ ID NO: 1, and the Factor VIII amino acid sequence comprises amino acids corresponding to positions 724 to 731 and 1670 to 1689 of SEQ ID NO: 1. Optionally, the Factor VIII amino acid sequence does not comprise amino acids corresponding to positions 732 to 1669 of SEQ ID NO: 1, and the Factor VIII amino acid sequence comprises amino acids corresponding to positions 724 to 731 and 1670 to 1689 of SEQ ID NO: 1 and the tyrosine amino acids corresponding to positions 718, 719 and 723 of SEQ ID NO: 1. Optionally, the Factor VIII amino acid sequence does not comprise amino acids corresponding to positions 732 to 1669 of SEQ ID NO: 1, and the Factor VIII amino acid sequence comprises amino acids corresponding to positions 714 to 731 and 1670 to 1689 of SEQ ID NO: 1. Optionally, the Factor VIII amino acid sequence does not comprise amino acids corresponding to positions 732 to 1669 of SEQ ID NO: 1, and the Factor VIII amino acid sequence comprises amino acids corresponding to positions 714 to 731 and 1670 to 1696 of SEQ ID NO: 1. Optionally, the Factor VIII amino acid sequence does not comprise amino acids corresponding to positions 732 to 1669 of SEQ ID NO: 1, and the Factor VIII amino acid sequence comprises amino acids corresponding to positions 1 to 731 and 1670 to 2332 of SEQ ID NO: 1.

[0167] Optionally, the Factor VIII amino acid sequence does not comprise amino acids corresponding to positions 729 to 1666 of SEQ ID NO: 1. Optionally, the Factor VIII amino acid sequence does not comprise amino acids corresponding to positions 729 to 1666 of SEQ ID NO: 1, and the Factor VIII amino acid sequence comprises amino acids corresponding to positions 724 to 728 of SEQ ID NO: 1. Optionally, the Factor VIII amino acid sequence does not comprise amino acids corresponding to positions 729 to 1666 of SEQ ID NO: 1, and the Factor VIII amino acid sequence comprises amino acids corresponding to positions 714 to 728 of SEQ ID NO: 1. Optionally, the Factor VIII amino acid sequence does not comprise amino acids corresponding to positions 729 to 1666 of SEQ ID NO: 1, and the Factor VIII amino acid sequence comprises amino acids corresponding to positions 1667 to 1689 of SEQ ID NO: 1. Optionally, the Factor VIII amino acid sequence does not comprise amino acids corresponding to positions 729 to 1666 of SEQ ID NO: 1, and the Factor VIII amino acid sequence comprises amino acids corresponding to positions 1667 to 1696 of SEQ ID NO: 1. Optionally, the Factor VIII amino acid sequence does not comprise amino acids corresponding to positions 729 to 1666 of SEQ ID NO: 1, and the Factor VIII amino acid sequence comprises amino acids corresponding to positions 724 to 728 and 1667 to 1689 of SEQ ID NO: 1. Optionally, the Factor VIII amino acid sequence does not comprise amino acids corresponding to positions 729 to 1666 of SEQ ID NO: 1, and the Factor VIII amino acid sequence comprises amino acids corresponding to positions 724 to 728 and 1667 to 1689 of SEQ ID NO: 1 and the tyrosine amino acids corresponding to positions 718, 719 and 723 of SEQ ID NO: 1. Optionally, the Factor VIII amino acid sequence does not comprise amino acids corresponding to positions 729 to 1666 of SEQ ID NO: 1, and the Factor VIII amino acid sequence comprises amino acids corresponding to positions 714 to 728 and 1667 to 1689 of SEQ ID NO: 1. Optionally, the Factor VIII amino acid sequence does not comprise amino acids corresponding to positions 729 to 1666 of SEQ ID NO: 1, and the Factor VIII amino acid sequence comprises amino acids corresponding to positions 714 to 728 and 1667 to 1696 of SEQ ID NO: 1. Optionally, the Factor VIII amino acid sequence does not comprise amino acids corresponding to positions 729 to 1666 of SEQ ID NO: 1, and the Factor VIII amino acid sequence comprises amino acids corresponding to positions 1 to 728 and 1667 to 2332 of SEQ ID NO: 1.

[0168] Optionally, the Factor VIII amino acid sequence does not comprise amino acids corresponding to positions 723 to 740 of SEQ ID NO: 1.

[0169] Optionally, the Factor VIII amino acid sequence may comprise any one of the amino acids corresponding to positions 713 to 745 of SEQ ID NO:1 directly linked to any one of the amino acids corresponding to positions 1640 to 1697 of SEQ ID NO:1. In this context the term “directly linked” indicates that two amino acids are joined by a peptide bond. Put another way, optionally, the Factor VIII amino acid sequence may comprise any one of the amino acids corresponding to positions 713 to 745 of SEQ ID NO:1 joined by a peptide bond to any one of the amino acids corresponding to positions 1640 to 1697 of SEQ ID NO:1.

[0170] Optionally, the Factor VIII amino acid sequence may comprise any one of the amino acids corresponding to positions 713 to 745 of SEQ ID NO:1 directly linked to any one of the amino acids corresponding to positions 1640 to 1690 of SEQ ID NO:1. Optionally, the Factor VIII amino acid sequence may comprise any one of the amino acids corresponding to positions 713 to 740 of SEQ ID NO:1 directly linked to any one of the amino acids corresponding to positions 1640 to 1697 of SEQ ID NO:1. Optionally, the Factor VIII amino acid sequence may comprise any one of the amino acids corresponding to positions 713 to 740 of SEQ ID NO:1 directly linked to any one of the amino acids corresponding to positions 1649 to 1690 of SEQ ID NO:1. Optionally, the Factor VIII amino acid sequence may comprise any one of the amino acids corresponding to positions 713 to 740 of SEQ ID NO:1 directly linked to any one of the amino acids corresponding to positions 1670 to 1689 of SEQ ID NO:1. Optionally, the Factor VIII amino acid sequence may comprise any one of the amino acids corresponding to positions 713 to 740 of SEQ ID NO:1 directly linked to any one of the amino acids corresponding to positions 1649 to 1670 of SEQ ID NO:1.

[0171] Optionally, the Factor VIII amino acid sequence may comprise any one of the amino acids corresponding to positions 721 to 740 of SEQ ID NO: 1 directly linked to any one of the amino acids corresponding to positions 1640 to 1697 of SEQ ID NO: 1. Optionally, the Factor VIII amino acid sequence may comprise any one of the amino acids corresponding to positions 721 to 740 of SEQ ID NO: 1 directly linked to any one of the amino acids corresponding to positions 1640 to 1690 of SEQ ID NO: 1. Optionally, the Factor VIII amino acid sequence may comprise any one of the amino acids corresponding to positions 723 to 740 of SEQ ID NO: linked to any one of the amino acids corresponding to positions 1640 to 1697 of SEQ ID NO:1. Optionally, the Factor VIII amino acid sequence may comprise any one of the amino acids corresponding to positions 723 to 740 of SEQ ID NO: linked to any one of the amino acids corresponding to positions 1640 to 1690 of SEQ ID NO:1. Optionally, the Factor VIII amino acid sequence may comprise any one of the amino acids corresponding to positions 721 to 731 of SEQ ID NO: 1 directly linked to any one of the amino acids corresponding to positions 1640 to 1697 of SEQ ID NO: 1. Optionally, the Factor VIII amino acid sequence may comprise any one of the amino acids corresponding to positions 721 to 731 of SEQ ID NO: 1 directly linked to any one of the amino acids corresponding to positions 1640 to 1690 of SEQ ID NO: 1. Optionally, the Factor VIII amino acid sequence may comprise any one of the amino acids corresponding to positions 731 to 741 of SEQ ID NO: linked to any one of the amino acids corresponding to positions 1640 to 1697 of SEQ ID NO:1. Optionally, the Factor VIII amino acid sequence may comprise any one of the amino acids corresponding to positions 731 to 741 of SEQ ID NO: linked to any one of the amino acids corresponding to positions 1640 to 1690 of SEQ ID NO:1. Optionally, the Factor VIII amino acid sequence may comprise any one of the amino acids corresponding to positions 721 to 740 of SEQ ID NO: 1 directly linked to any one of the amino acids corresponding to positions 1649 to 1690 of SEQ ID NO: 1. Optionally, the Factor VIII amino acid sequence may comprise any one of the amino acids corresponding to positions 723 to 740 of SEQ ID NO: 1 directly linked to any one of the amino acids corresponding to positions 1649 to 1690 of SEQ ID NO: 1. Optionally, the Factor VIII amino acid sequence may comprise any one of the amino acids corresponding to positions 721 to 731 of SEQ ID NO: 1 directly linked to any one of the amino acids corresponding to positions 1649 to 1690 of SEQ ID NO: 1. Optionally, the Factor VIII amino acid sequence may comprise any one of the amino acids corresponding to positions 731 to 741 of SEQ ID NO: linked to any one of the amino acids corresponding to positions 1649 to 1690 of SEQ ID NO:1. Optionally, the Factor VIII amino acid sequence may comprise any one of the amino acids corresponding to positions 721 to 740 of SEQ ID NO: 1 directly linked to any one of the amino acids corresponding to positions 1670 to 1689 of SEQ ID NO: 1. Optionally, the Factor VIII amino acid sequence may comprise any one of the amino acids corresponding to positions 723 to 740 of SEQ ID NO: 1 directly linked to any one of the amino acids corresponding to positions 1670 to 1689 of SEQ ID NO: 1. Optionally, the Factor VIII amino acid sequence may comprise any one of the amino acids corresponding to positions 721 to 731 of SEQ ID NO: 1 directly linked to any one of the amino acids corresponding to positions 1670 to 1689 of SEQ ID NO: 1. Optionally, the Factor VIII amino acid sequence may comprise any one of the amino acids corresponding to positions 731 to 741 of SEQ ID NO: linked to any one of the amino acids corresponding to positions 1670 to 1689 of SEQ ID NO:1. Optionally, the Factor VIII amino acid sequence may comprise any one of the amino acids corresponding to positions 721 to 740 of SEQ ID NO: 1 directly linked to any one of the amino acids corresponding to positions 1649 to 1670 of SEQ ID NO: 1. Optionally, the Factor VIII amino acid sequence may comprise any one of the amino acids corresponding to positions 723 to 740 of SEQ ID NO: 1 directly linked to any one of the amino acids corresponding to positions 1649 to 1670 of SEQ ID NO: 1. Optionally, the Factor VIII amino acid sequence may comprise any one of the amino acids corresponding to positions 721 to 731 of SEQ ID NO: 1 directly linked to any one of the amino acids corresponding to positions 1649 to 1670 of SEQ ID NO: 1. Optionally, the Factor VIII amino acid sequence may comprise any one of the amino acids corresponding to positions 731 to 741 of SEQ ID NO: linked to any one of the amino acids corresponding to positions 1649 to 1670 of SEQ ID NO:1.

[0172] Optionally, the Factor VIII amino acid sequence may comprise any one of the amino acids corresponding to positions 723 to 737 of SEQ ID NO:1 directly linked to any one of the amino acids corresponding to positions 1649 to 1690 of SEQ ID NO:1. Optionally, the Factor VIII amino acid sequence may comprise any one of the amino acids corresponding to positions 723 to 737 of SEQ ID NO:1 directly linked to any one of the amino acids corresponding to positions 1649 to 1670 of SEQ ID NO:1. Optionally, the Factor VIII amino acid sequence may comprise any one of the amino acids corresponding to positions 722 to 737 of SEQ ID NO:1 directly linked to any one of the amino acids corresponding to positions 1649 to 1689 of SEQ ID NO:1. Optionally, the Factor VIII amino acid sequence may comprise any one of the amino acids corresponding to positions 722 to 737 of SEQ ID NO:1 directly linked to any one of the amino acids corresponding to positions 1649 to 1670 of SEQ ID NO:1.

[0173] Optionally, the Factor VIII amino acid sequence may comprise the amino acid corresponding to position 722 of SEQ ID NO:1 directly linked to any one of the amino acids corresponding to positions 1640 to 1690 of SEQ ID NO:1. Optionally, the Factor VIII amino acid sequence may comprise the amino acid corresponding to position 722 of SEQ ID NO:1 directly linked to any one of the amino acids corresponding to positions 1649 to 1690 of SEQ ID NO:1. Optionally, the Factor VIII amino acid sequence may comprise the amino acid corresponding to position 722 of SEQ ID NO:1 directly linked to any one of the amino acids corresponding to positions 1670 to 1689 of SEQ ID NO:1. Optionally, the Factor VIII amino acid sequence may comprise the amino acid corresponding to position 722 of SEQ ID NO:1 directly linked to any one of the amino acids corresponding to positions 1649 to 1670 of SEQ ID NO:1. Optionally, the Factor VIII amino acid sequence may comprise the amino acid corresponding to position 722 of SEQ ID NO:1 directly linked to the amino acid corresponding to position 1667 of SEQ ID NO:1. Optionally, the Factor VIII amino acid sequence may comprise the amino acid corresponding to position 722 of SEQ ID NO:1 directly linked to the amino acid corresponding to position 1670 of SEQ ID NO:1.

[0174] Optionally, the Factor VIII amino acid sequence may comprise the amino acid corresponding to position 723 of SEQ ID NO:1 directly linked to any one of the amino acids corresponding to positions 1640 to 1690 of SEQ ID NO:1. Optionally, the Factor VIII amino acid sequence may comprise the amino acid corresponding to position 723 of SEQ ID NO:1 directly linked to any one of the amino acids corresponding to positions 1649 to 1690 of SEQ ID NO:1. Optionally, the Factor VIII amino acid sequence may comprise the amino acid corresponding to position 723 of SEQ ID NO:1 directly linked to any one of the amino acids corresponding to positions 1670 to 1689 of SEQ ID NO:1. Optionally, the Factor VIII amino acid sequence may comprise the amino acid corresponding to position 723 of SEQ ID NO:1 directly linked to any one of the amino acids corresponding to positions 1649 to 1670 of SEQ ID NO:1. Optionally, the Factor VIII amino acid sequence may comprise the amino acid corresponding to position 723 of SEQ ID NO:1 directly linked to the amino acid corresponding to position 1667 of SEQ ID NO:1. Optionally, the Factor VIII amino acid sequence may comprise the amino acid corresponding to position 723 of SEQ ID NO:1 directly linked to the amino acid corresponding to position 1670 of SEQ ID NO:1.

[0175] Optionally, the Factor VIII amino acid sequence may comprise the amino acid corresponding to position 725 of SEQ ID NO:1 directly linked to any one of the amino acids corresponding to positions 1640 to 1690 of SEQ ID NO:1. Optionally, the Factor VIII amino acid sequence may comprise the amino acid corresponding to position 725 of SEQ ID NO:1 directly linked to any one of the amino acids corresponding to positions 1649 to 1690 of SEQ ID NO:1. Optionally, the Factor VIII amino acid sequence may comprise the amino acid corresponding to position 725 of SEQ ID NO:1 directly linked to any one of the amino acids corresponding to positions 1670 to 1689 of SEQ ID NO:1. Optionally, the Factor VIII amino acid sequence may comprise the amino acid corresponding to position 725 of SEQ ID NO:1 directly linked to any one of the amino acids corresponding to positions 1649 to 1670 of SEQ ID NO:1.

[0176] Optionally, the Factor VIII amino acid sequence may comprise the amino acid corresponding to position 725 of SEQ ID NO:1 directly linked to the amino acid corresponding to position 1667 of SEQ ID NO:1. Optionally, the Factor VIII amino acid sequence may comprise the amino acid corresponding to position 725 of SEQ ID NO:1 directly linked to the amino acid corresponding to position 1670 of SEQ ID NO:1.

[0177] Optionally, the Factor VIII amino acid sequence may comprise the amino acid corresponding to position 728 of SEQ ID NO:1 directly linked to any one of the amino acids corresponding to positions 1640 to 1690 of SEQ ID NO:1. Optionally, the Factor VIII amino acid sequence may comprise the amino acid corresponding to position 728 of SEQ ID NO:1 directly linked to any one of the amino acids corresponding to positions 1649 to 1690 of SEQ ID NO:1. Optionally, the Factor VIII amino acid sequence may comprise the amino acid corresponding to position 728 of SEQ ID NO:1 directly linked to any one of the amino acids corresponding to positions 1670 to 1689 of SEQ ID NO:1. Optionally, the Factor VIII amino acid sequence may comprise the amino acid corresponding to position 728 of SEQ ID NO:1 directly linked to any one of the amino acids corresponding to positions 1649 to 1670 of SEQ ID NO:1. Optionally, the Factor VIII amino acid sequence may comprise the amino acid corresponding to position 728 of SEQ ID NO:1 directly linked to the amino acid corresponding to position 1667 of SEQ ID NO:1. Optionally, the Factor VIII amino acid sequence may comprise the amino acid corresponding to position 728 of SEQ ID NO:1 directly linked to the amino acid corresponding to position 1670 of SEQ ID NO:1.

[0178] Optionally, the Factor VIII amino acid sequence may comprise the amino acid corresponding to position 731 of SEQ ID NO:1 directly linked to any one of the amino acids corresponding to positions 1640 to 1690 of SEQ ID NO:1. Optionally, the Factor VIII amino acid sequence may comprise the amino acid corresponding to position 731 of SEQ ID NO:1 directly linked to any one of the amino acids corresponding to positions 1649 to 1690 of SEQ ID NO:1. Optionally, the Factor VIII amino acid sequence may comprise the amino acid corresponding to position 731 of SEQ ID NO:1 directly linked to any one of the amino acids corresponding to positions 1670 to 1689 of SEQ ID NO:1. Optionally, the Factor VIII amino acid sequence may comprise the amino acid corresponding to position 731 of SEQ ID NO:1 directly linked to any one of the amino acids corresponding to positions 1649 to 1670 of SEQ ID NO:1. Optionally, the Factor VIII amino acid sequence may comprise the amino acid corresponding to position 731 of SEQ ID NO:1 directly linked to the amino acid corresponding to position 1667 of SEQ ID NO:1. Optionally, the Factor VIII amino acid sequence may comprise the amino acid corresponding to position 731 of SEQ ID NO:1 directly linked to the amino acid corresponding to position 1670 of SEQ ID NO:1.

[0179] Optionally, the Factor VIII amino acid sequence may comprise the amino acid corresponding to position 737 of SEQ ID NO:1 directly linked to any one of the amino acids corresponding to positions 1640 to 1690 of SEQ ID NO:1. Optionally, the Factor VIII amino acid sequence may comprise the amino acid corresponding to position 737 of SEQ ID NO:1 directly linked to any one of the amino acids corresponding to positions 1649 to 1690 of SEQ ID NO:1. Optionally, the Factor VIII amino acid sequence may comprise the amino acid corresponding to position 737 of SEQ ID NO:1 directly linked to any one of the amino acids corresponding to positions 1670 to 1689 of SEQ ID NO:1. Optionally, the Factor VIII amino acid sequence may comprise the amino acid corresponding to position 737 of SEQ ID NO:1 directly linked to any one of the amino acids corresponding to positions 1649 to 1670 of SEQ ID NO:1. Optionally, the Factor VIII amino acid sequence may comprise the amino acid corresponding to position 737 of SEQ ID NO:1 directly linked to the amino acid corresponding to position 1667 of SEQ ID NO:1. Optionally, the Factor VIII amino acid sequence may comprise the amino acid corresponding to position 737 of SEQ ID NO:1 directly linked to the amino acid corresponding to position 1670 of SEQ ID NO:1.

[0180] Optionally, the Factor VIII amino acid sequence may comprise the amino acid corresponding to position 740 of SEQ ID NO:1 directly linked to any one of the amino acids corresponding to positions 1640 to 1690 of SEQ ID NO:1. Optionally, the Factor VIII amino acid sequence may comprise the amino acid corresponding to position 740 of SEQ ID NO:1 directly linked to any one of the amino acids corresponding to positions 1649 to 1690 of SEQ ID NO:1. Optionally, the Factor VIII amino acid sequence may comprise the amino acid corresponding to position 740 of SEQ ID NO:1 directly linked to any one of the amino acids corresponding to positions 1670 to 1689 of SEQ ID NO:1. Optionally, the Factor VIII amino acid sequence may comprise the amino acid corresponding to position 740 of SEQ ID NO:1 directly linked to any one of the amino acids corresponding to positions 1649 to 1670 of SEQ ID NO:1. Optionally, the Factor VIII amino acid sequence may comprise the amino acid corresponding to position 740 of SEQ ID NO:1 directly linked to the amino acid corresponding to position 1667 of SEQ ID NO:1. Optionally, the Factor VIII amino acid sequence may comprise the amino acid corresponding to position 740 of SEQ ID NO:1 directly linked to the amino acid corresponding to position 1670 of SEQ ID NO:1.

[0181] Optionally, the Factor VIII amino acid sequence may comprise any one of the amino acids corresponding to positions 722 to 740 of SEQ ID NO:1 directly linked to the amino acid corresponding to position 1649 of SEQ ID NO:1. Optionally, the Factor VIII amino acid sequence may comprise any one of the amino acids corresponding to positions 723 to 737 of SEQ ID NO:1 directly linked to the amino acid corresponding to position 1649 of SEQ ID NO:1. Optionally, the Factor VIII amino acid sequence may comprise any one of the amino acids corresponding to positions 725 to 731 of SEQ ID NO:1 directly linked to the amino acid corresponding to position 1649 of SEQ ID NO:1. Optionally, the Factor VIII amino acid sequence may comprise any one of the amino acids corresponding to positions 728 to 731 of SEQ ID NO:1 directly linked to the amino acid corresponding to position 1649 of SEQ ID NO:1.

[0182] ionally, the Factor VIII amino acid sequence may comprise any one of the amino acids corresponding to positions 722 to 740 of SEQ ID NO:1 directly linked to the amino acid corresponding to position 1667 of SEQ ID NO:1. Optionally, the Factor VIII amino acid sequence may comprise any one of the amino acids corresponding to positions 723 to 737 of SEQ ID NO:1 directly linked to the amino acid corresponding to position 1667 of SEQ ID NO:1. Optionally, the Factor VIII amino acid sequence may comprise any one of the amino acids corresponding to positions 725 to 731 of SEQ ID NO:1 directly linked to the amino acid corresponding to position 1667 of SEQ ID NO:1. Optionally, the Factor VIII amino acid sequence may comprise any one of the amino acids corresponding to positions 728 to 731 of SEQ ID NO:1 directly linked to the amino acid corresponding to position 1667 of SEQ ID NO:1.

[0183] Optionally, the Factor VIII amino acid sequence may comprise any one of the amino acids corresponding to positions 722 to 740 of SEQ ID NO:1 directly linked to the amino acid corresponding to position 1670 of SEQ ID NO:1. Optionally, the Factor VIII amino acid sequence may comprise any one of the amino acids corresponding to positions 723 to 737 of SEQ ID NO:1 directly linked to the amino acid corresponding to position 1670 of SEQ ID NO:1. Optionally, the Factor VIII amino acid sequence may comprise any one of the amino acids corresponding to positions 725 to 731 of SEQ ID NO:1 directly linked to the amino acid corresponding to position 1670 of SEQ ID NO:1. Optionally, the Factor VIII amino acid sequence may comprise any one of the amino acids corresponding to positions 728 to 731 of SEQ ID NO:1 directly linked to the amino acid corresponding to position 1670 of SEQ ID NO:1.

[0184] Optionally, the Factor VIII amino acid sequence may comprise any one of the amino acids corresponding to positions 722 to 740 of SEQ ID NO:1 directly linked to the amino acid corresponding to position 1689 of SEQ ID NO:1. Optionally, the Factor VIII amino acid sequence may comprise any one of the amino acids corresponding to positions 723 to 737 of SEQ ID NO:1 directly linked to the amino acid corresponding to position 1689 of SEQ ID NO:1. Optionally, the Factor VIII amino acid sequence may comprise any one of the amino acids corresponding to positions 725 to 731 of SEQ ID NO:1 directly linked to the amino acid corresponding to position 1689 of SEQ ID NO:1. Optionally, the Factor VIII amino acid sequence may comprise any one of the amino acids corresponding to positions 728 to 731 of SEQ ID NO:1 directly linked to the amino acid corresponding to position 1689 of SEQ ID NO:1.

[0185] Reference to “any one of the amino acids” corresponding to a first range of positions of SEQ ID NO: 1 (e.g. 723 to 737) directly linked to “any one of the amino acids” corresponding to a second range of positions of SEQ ID NO: 1 (e.g. 1649 to 1670) is intended to be inclusive, i.e. the higher and lower amino acid positions recited in the respective ranges are included.

[0186] Optionally, the Factor VIII polypeptide may comprise the amino acid sequence of any one of SEQ ID NOs: 95 to 122. Optionally, the Factor VIII polypeptide may comprise the amino acid sequence of any one of SEQ ID NOs: 95 to 98, 103 to 108, and 111 to 122. Optionally, the Factor VIII polypeptide may comprise the amino acid sequence of any one of SEQ ID NOs: 95 to 98, 103 to 107, and 111 to 122. Optionally, the Factor VIII polypeptide may comprise the amino acid sequence of SEQ ID NO: 117.

[0187] Optionally, the Factor VIII polypeptide may comprise a Factor VIII amino acid sequence which has at least 90% sequence identity to any one of SEQ ID NOs: 9-36. The Factor VIII polypeptide may comprise an amino acid sequence which is at least 95%, at least 96%, at least 98%, at least 99% or 100% identical to any one of SEQ ID NOs: 9-36. Optionally, the

[0188] Factor VIII polypeptide may be a Factor VIII amino acid sequence which has at least 90% sequence identity to any one of SEQ ID NOs:9-36. The Factor VIII polypeptide may be a Factor VIII amino acid sequence which has at least 95%, at least 96%, at least 97%, at least 98% or at least 99% sequence identity to any one of SEQ ID NOs: 9-36. The Factor VIII amino acid sequence may comprise any one of SEQ ID NOs: 9-36. The Factor VIII amino acid sequence may be any one of SEQ ID NOs: 9-36.

[0189] Optionally, the Factor VIII polypeptide may comprise a Factor VIII amino acid sequence which has at least 90% sequence identity to any one of SEQ ID NOs: 9 to 12, 17 to 22 and 25 to 36. The Factor VIII polypeptide may comprise an amino acid sequence which is at least 95%, at least 96%, at least 98%, at least 99% or 100% identical to any one of SEQ ID NOs: 9 to 12, 17 to 22 and 25 to 36. Optionally, the Factor VIII polypeptide may be a Factor VIII amino acid sequence which has at least 90% sequence identity to any one of SEQ ID NOs: 9 to 12, 17 to 22 and 25 to 36. The Factor VIII polypeptide may be a Factor VIII amino acid sequence which has at least 95%, at least 96%, at least 97%, at least 98% or at least 99% sequence identity to any one of SEQ ID NOs: 9 to 12, 17 to 22 and 25 to 36. The Factor VIII amino acid sequence may comprise any one of SEQ ID NOs: 9 to 12, 17 to 22 and 25 to 36. The Factor VIII amino acid sequence may be any one of SEQ ID NOs: 9 to 12, 17 to 22 and 25 to 36.

[0190] Optionally, the Factor VIII polypeptide may comprise a Factor VIII amino acid sequence which has at least 90% sequence identity to any one of SEQ ID NOs: 9 to 12, 17 to 21 and 25 to 36. The Factor VIII polypeptide may comprise an amino acid sequence which is at least 95%, at least 96%, at least 98%, at least 99% or 100% identical to any one of SEQ ID NOs: 9 to 12, 17 to 21 and 25 to 36. Optionally, the Factor VIII polypeptide may be a Factor VIII amino acid sequence which has at least 90% sequence identity to any one of SEQ ID NOs: 9 to 12, 17 to 21 and 25 to 36. The Factor VIII polypeptide may be a Factor VIII amino acid sequence which has at least 95%, at least 96%, at least 97%, at least 98% or at least 99% sequence identity to any one of SEQ ID NOs: 9 to 12, 17 to 21 and 25 to 36. The Factor VIII amino acid sequence may comprise any one of SEQ ID NOs: 9 to 12, 17 to 21 and 25 to 36. The Factor VIII amino acid sequence may be any one of SEQ ID NOs: 9 to 12, 17 to 21 and 25 to 36.

[0191] Optionally, the Factor VIII polypeptide may comprise a Factor VIII amino acid sequence which has at least 90% sequence identity to SEQ ID NO: 31. The Factor VIII polypeptide may comprise an amino acid sequence which is at least 95%, at least 96%, at least 98%, at least 99% or 100% identical to SEQ ID NO: 31. Optionally, the Factor VIII polypeptide may be a Factor VIII amino acid sequence which has at least 90% sequence identity to SEQ ID NO: 31. The Factor VIII polypeptide may be a Factor VIII amino acid sequence which has at least 95%, at least 96%, at least 97%, at least 98% or at least 99% sequence identity to SEQ ID NO: 31. The Factor VIII amino acid sequence may comprise SEQ ID NO: 31. The Factor VIII amino acid sequence may be SEQ ID NO: 31.

[0192] Amino acids “corresponding to” specified positions of a specified SEQ ID NO may be amino acids at the specified positions of the particular SEQ ID NO recited. For example, the amino acids “corresponding to positions 724 to 740 of SEQ ID NO: 1” may be the amino acids at positions 724 to 740 of SEQ ID NO: 1. Alternatively, amino acids “corresponding to” specified positions of a specified SEQ ID NO may be amino acids from an alternative amino acid sequence which correspond to the specified positions of the specified SEQ ID NO. For example, the amino acids “corresponding to positions 724 to 740 of SEQ ID NO: 1” may be the amino acids from an alternative amino acid sequence which correspond to positions 724 to 740 of SEQ ID NO: 1. It is within the capabilities of the person skilled in the art to determine which amino acids in an alternative amino acid sequence “correspond to” the specified positions in the specified SEQ ID NO. For example, the person skilled in the art merely needs to perform a sequence alignment of the alternative amino acid sequence with the specified SEQ ID NO using a suitable alignment algorithm such as that of Needleman and Wunsch described above, and determine which region of the alternative amino acid sequence aligns to the specified positions in the specified SEQ ID NO. For example, the skilled person is able to align the alternative amino acid sequence with SEQ ID NO: 1 and determine which amino acids align, and therefore correspond to, positions 724 to 740 of SEQ ID NO. 1.

[0193] A Polynucleotide Comprising a Factor VIII Nucleotide Sequence

[0194] The invention provides a polynucleotide comprising a Factor VIII nucleotide sequence, wherein the Factor VIII nucleotide sequence encodes a Factor VIII polypeptide and wherein the Factor VIII nucleotide sequence is not a wild-type Factor VIII nucleotide sequence. The Factor VIII nucleotide sequence may encode any of the Factor VIII amino acid sequences or Factor VIII polypeptides of the invention, or another Factor VIII amino acid sequence such as that of a wild-type Factor VIII polypeptide or a wild-type Factor VIII polypeptide lacking the B domain.

[0195] The term “polynucleotide” refers to a polymeric chain of nucleotides of any length, e.g. deoxyribonucleotides, ribonucleotides, or analogs thereof. For example, the polynucleotide may comprise DNA (deoxyribonucleotides) or RNA (ribonucleotides). The polynucleotide may consist of DNA. The polynucleotide may be mRNA. Since the polynucleotide may comprise RNA or DNA, all references to T (thymine) nucleotides may be replaced with U (uracil).

[0196] The Factor VIII nucleotide sequence encodes a Factor VIII polypeptide. A “sequence” that “encodes” refers to a nucleotide sequence comprising codons that encode the encoded amino acid sequence. For example, a nucleotide sequence that encodes a Factor VIII polypeptide comprises codons that encode the Factor VIII polypeptide. A suitable nucleotide sequence is provided in SEQ ID NO:3. The Factor VIII nucleotide sequence may comprise one or more regions of one or more non-coding nucleotides, such as introns. The regions of non-coding nucleotides may interrupt the sequence of codons that encode the encoded amino acid sequence. Thus the sequence of codons that encode the encoded amino acid sequence may be contiguous in sequence or separated by one or more regions of non-coding nucleotides. Preferably the Factor VIII nucleotide sequence does not comprise any non-coding nucleotides. Herein, the stop codon will not be considered non-coding nucleotides.

[0197] The following Table (Table 1) describes codons that encode each amino acid:

| Amino Acid | Codon |
|---|---|
| Phenylalanine | TTC |
| | TTT |
| Leucine | TTA |
| | TTG |
| | CTT |
| | CTC |
| | CTA |
| | CTG |
| Isoleucine | ATT |
| | ATC |
| | ATA |
| Methionine | ATG |
| Valine | GTT |
| | GTC |
| | GTA |
| | GTG |
| Serine | TCT |
| | TCC |
| | TCA |
| | TCG |
| | AGT |
| | AGC |
| Arginine | CGT |
| | CGC |
| | CGA |
| | CGG |
| | AGA |
| | AGG |
| Proline | CCT |
| | CCC |
| | CCA |
| | CCG |
| Threonine | ACT |
| | ACC |
| | ACA |
| | ACG |
| Alanine | GCT |
| | GCC |
| | GCA |
| | GCG |
| Tyrosine | TAT |
| | TAC |
| Histidine | CAT |
| | CAC |
| Glutamine | CAA |
| | CAG |
| Glycine | GGT |
| | GGC |
| | GGA |
| | GGG |
| Asparagine | AAT |
| | AAC |
| Lysine | AAA |
| | AAG |
| Aspartic Acid | GAT |
| | GAC |
| Glutamic Acid | GAA |
| | GAG |
| Cysteine | TGT |
| | TGC |
| Tryptophan | TGG |

[0198] The corresponding RNA codons will contain Us in place of the Ts in the Table (Table 1) above.

[0199] The Factor VIII nucleotide sequence may encode a mature Factor VIII polypeptide. Optionally, the Factor VIII nucleotide sequence does not encode all or a portion of a signal peptide. The Factor VIII nucleotide sequence may encode all or part of a signal peptide, such as any or part of any of the signal peptides described herein.

[0200] The Factor VIII nucleotide sequence of the invention comprises a sequence of nucleotides which is not found in the corresponding portion of a wild-type Factor VIII nucleotide sequence. The Factor VIII nucleotide may comprise one or more portions which is not wild-type sequence (i.e. a sequence found in the corresponding portion of a wild-type Factor VIII nucleotide sequence). Put another way, at least a portion of the Factor VIII nucleotide sequence is not a sequence corresponding to a wild-type nucleotide sequence encoding Factor VIII. For example, one or more of the wild-type nucleotides may be absent (e.g. deleted) in the Factor VIII nucleotide sequence of the invention in comparison to a corresponding portion of the wild-type Factor VIII nucleotide sequence. Alternatively or additionally, the Factor VIII nucleotide sequence of the invention may comprise one or more additional nucleotides in comparison to a corresponding portion of the wild-type Factor VIII nucleotide sequence. Alternatively or additionally, the Factor VIII nucleotide sequence of the invention may comprise one or more nucleotide(s) in place of wild-type nucleotide(s) (e.g. substitutions) in comparison to a corresponding portion of the wild-type Factor VIII nucleotide sequence. For example, the Factor VIII nucleotide sequence of the invention may comprise one or more different codons in place of the wild-type codon(s) (i.e. the codon found in the corresponding position in a wild-type Factor VIII nucleotide sequence), wherein a “different” codon encodes a different amino acid to the amino acid encoded by the wild-type codon. As a further example, the Factor VIII nucleotide sequence of the invention may comprise one or more alternative codon(s) in place of the wild-type codon(s), wherein an “alternative” codon is a codon which has a different sequence to the wild-type codon but which encodes the same amino acid as the wild-type codon (i.e. a degenerate codon). Table 1 describes the codons which encode each amino acid.

[0201] The Factor VIII nucleotide sequence of the invention may comprise one or more (e.g. two, three, four, five, six or more) portions which are codon-optimised. The Factor VIII nucleotide sequence of the invention may be codon-optimised. As mentioned above, the genetic code is degenerate, and many amino acids may be encoded by more than one alternative codon. However, the genetic code of different organisms, tissues or cells may be biased towards using one particular codon for encoding a particular amino acid. A nucleotide sequence that is “codon-optimised” may express at higher levels in a particular cell type such as Huh7 cells. Preferably, a codon-optimised nucleic acid sequence is modified relative to a wild-type sequence whilst the amino acid sequence encoded by the nucleotide sequence is not modified.

[0202] By describing a nucleotide sequence as “codon-optimised”, all the codons do not need to be optimised. Thus the portion of the Factor VIII nucleotide sequence that is codon-optimised may comprise one or more alternative codon(s) in place of the wild-type codon(s) when compared to the corresponding portion of a wild-type Factor VIII nucleotide sequence. If the Factor VIII nucleotide sequence comprises a portion that is codon-optimised, the polypeptide encoded by the Factor VIII nucleotide sequence may be expressed at a higher level than a polypeptide encoded by a wild-type Factor VIII nucleotide sequence. The portion of the Factor VIII nucleotide sequence that is codon-optimised may be codon-optimised for expression in human liver cells. Thus the polypeptide encoded by the Factor VIII nucleotide sequence may be expressed at a higher level than the polypeptide encoded by an equivalent non-codon-optimised (e.g. a wild-type) Factor VIII nucleotide sequence when the sequences are expressed in human liver cells. An “equivalent” non-codon optimised Factor VIII nucleotide sequence is identical (i.e. encodes the same Factor VIII polypeptide and comprises the same transcriptional regulatory elements etc.) except the codons used to encode the Factor VIII polypeptide will correspond to the corresponding codons of a wild-type Factor VIII sequence such as SEQ ID NO: 2. Typically, the codon-optimised portion of the Factor VIII nucleotide sequence does not comprise the stop codon.

[0203] A portion of the Factor VIII nucleotide sequence that is codon-optimised may encode a contiguous portion of a Factor VIII polypeptide. Optionally, the portion of the Factor VIII nucleotide sequence that is codon-optimised (or the Factor VIII nucleotide sequence) does not encode at least one amino acid(s) corresponding to positions 746 to 1639 of SEQ ID NO: 1. Optionally, the portion of the Factor VIII nucleotide sequence that is codon-optimised (or the Factor VIII nucleotide sequence) does not encode amino acids corresponding to positions 746 to 1639 of SEQ ID NO: 1. Optionally, the portion of the Factor VIII nucleotide sequence that is codon-optimised (or the Factor VIII nucleotide sequence) does not encode one or more amino acid(s) of the amino acid sequence of the modified BDR region. Optionally, the portion of the Factor VIII nucleotide sequence that is codon-optimised (or the Factor VIII nucleotide sequence) does not encode the amino acid sequence of the modified BDR region or the wild-type BDR region.

[0204] Optionally the entire Factor VIII nucleotide sequence may be codon-optimised.

[0205] The Factor VIII nucleotide sequence may comprise a sequence of nucleotides immediately juxtaposed to a further sequence of nucleotides or connected by a linker (e.g. a short linker), where the two sequences of nucleotides are found in a wild-type Factor VIII nucleotide sequence, but the two sequences of nucleotides are not immediately juxtaposed in a wild-type Factor VIII nucleotide sequence. Put another way, the nucleotides between the two sequences of nucleotides may be absent (e.g. deleted) in the Factor VIII nucleotide sequence in comparison to the corresponding portion of the wild-type Factor VIII nucleotide sequence. The Factor VIII nucleotide sequence may thus comprise a portion which is not wild type. For example, the Factor VIII nucleotide sequence may comprise nucleotides which encode the amino acids which correspond to positions 724 to 731 of SEQ ID NO: 1 immediately juxtaposed to nucleotides which encode the amino acids which correspond to positions 1670 to 1689 of SEQ ID NO: 1. Optionally, the two nucleotides sequences which are immediately juxtaposed are not the same as the corresponding wild-type sequences. The two nucleotides sequences which are immediately juxtaposed may vary in comparison to the corresponding portion of the wild-type sequence in any of the ways described herein, such as by being codon-optimised. As an example, the Factor VIII nucleotide sequence may comprise nucleotides 1 to 2193 of SEQ ID NO:3 immediately juxtaposed to nucleotides 2326 to 4314 of SEQ ID NO: 3 (or in other words, the Factor VIII nucleotide sequence may not comprise nucleotides 2194 to 2325 of SEQ ID NO:3, i.e. these nucleotides may be absent). As a further example, the Factor VIII nucleotide sequence may consist of nucleotides 1 to 2193 and 2326 to 4314 of SEQ ID NO:3.

[0206] As yet further examples, the Factor VIII nucleotide sequence may comprise or consist of nucleotides which encode the amino acids which correspond to the positions of SEQ ID NO:1 shown in Table 2 for the FVIII polypeptides having an amino acid sequence set forth in any one of SEQ ID NOs:9-36. These FVIII polypeptides each comprise at least a first sequence of amino acids and a second sequence of amino acids. A number of the FVIII polypeptides further comprise a third sequence of amino acids. The FVIII polypeptides are encoded by Factor VIII nucleotide sequences which comprise first and second (and optionally third) sequences of nucleotides which are not immediately juxtaposed in a wild-type Factor VIII nucleotide sequence. The Factor VIII nucleotide sequences may comprise or consist of such sequences of nucleotides immediately juxtaposed to one-another, such that the Factor VIII polypeptide encoded by the Factor VIII nucleotide comprises or consists of the amino acids of SEQ ID NO:1 indicated in Table 2.

TABLE 2
exemplary FVIII polypeptide sequences

| SEQ ID NO: | Amino acids corresponding to SEQ ID NO: 1 (deletion) |
|---|---|
| 9 | 1-740, 1670-2332 (741-1669) |
| 10 | 1-740, 1690-2332 (741-1689) |
| 11 | 1-740, 1689-2332 (741-1688) |
| 12 | 1-740, 1670-1680, 1689-2332 (741-1669, 1681-1688) |
| 13 | 1-713, 1670-2332 (714-1669) |
| 14 | 1-713, 1670-1680, 1689-2332 (714-1669, 1681-1688) |
| 15 | 1-713, 1689-2332 (714-1688) |
| 16 | 1-713, 1649-2332 (714-1648) |
| 17 | 1-737, 1649-2332 (738-1648) |
| 18 | 1-734, 1649-2332 (735-1648) |
| 19 | 1-731, 1649-2332 (732-1648) |
| 20 | 1-728, 1649-2332 (729-1648) |
| 21 | 1-725, 1649-2332 (726-1648) |
| 22 | 1-722, 1649-2332 (723-1648) |
| 23 | 1-719, 1649-2332 (720-1648) |
| 24 | 1-716, 1649-2332 (717-1648) |
| 25 | 1-737, 1652-2332 (738-1651) |
| 26 | 1-737, 1655-2332 (738-1654) |
| 27 | 1-737, 1658-2332 (738-1665) |
| 28 | 1-737, 1661-2332 (738-1660) |
| 29 | 1-737, 1664-2332 (738-1663) |
| 30 | 1-737, 1667-2332 (738-1666) |
| 31 | 1-731, 1670-2332 (732-1669) |
| 32 | 1-731, 1670-1680, 1689-2332 (732-1669, 1681-1688) |
| 33 | 1-722, 1670-2332 (723-1669) |
| 34 | 1-722, 1670-1680, 1689-2332 (723-1669, 1681-1688) |
| 35 | 1-728, 1670-2332 (729-1669) |
| 36 | 1-728, 1667-2332 (729-2332) |

[0207] The “corresponding portion of the wild-type Factor VIII nucleotide sequence” may comprise more than one region from the wild-type Factor VIII nucleotide sequence. For example, as described herein, the Factor VIII nucleotide sequence may comprise a sequence of nucleotides immediately juxtaposed to a further sequence nucleotides, where the two sequences of nucleotides are found in a wild-type Factor VIII nucleotide sequence, but the two sequences of nucleotides are not immediately juxtaposed in a wild-type Factor VIII nucleotide sequence. Thus, the corresponding portion of the wild-type Factor VIII nucleotide sequence comprises more than one region from the wild-type Factor VIII nucleotide sequence. It is within the capabilities of the person skilled in the art to determine which nucleotides in wild-type Factor VIII nucleotide sequence are the “corresponding portion” to the Factor VIII nucleotide sequence of the invention. For example, the person skilled in the art merely needs to perform a sequence alignment of the two nucleotide sequences using a suitable alignment algorithm such as that of Needleman and Wunsch described above, and determine which region or regions of the two nucleotide sequences align. For example, the skilled person is able to align a nucleotide sequence (such as SEQ ID NO: 3) with a wild-type nucleotide sequence (such as SEQ ID NO: 2) and determine which nucleotides align, and therefore determine which nucleotides in wild-type Factor VIII nucleotide sequence are the “corresponding portion” to the portion of the Factor VIII nucleotide sequence which is not wild-type. For example, positions 1 to 2193 and 2326 to 4314 of SEQ ID NO: 3 correspond to positions 1 to 2193 and 5008 to 6996 of SEQ ID NO: 2. Preferably, the skilled person aligns the amino acid sequences encoded by the nucleotide sequences to determine which nucleotides align. For example, the skilled person is able to align the amino acid sequence encoded by a nucleotide sequence (such as SEQ ID NO: 3) with the amino acid sequence encoded by a wild-type nucleotide sequence (such as SEQ ID NO: 2) and determine which amino acids align and therefore, in turn, determine which nucleotides align. Therefore a skilled person can determine which nucleotides in wild-type Factor VIII nucleotide sequence are the “corresponding portion” to the Factor VIII nucleotide sequence of the invention.

[0208] Optionally, the Factor VIII nucleotide sequence encodes at least one amino acid corresponding to positions 746 to 1639 of SEQ ID NO: 1. Optionally, the Factor VIII nucleotide sequence encodes at least 2, at least 5, at least 10 or at least 25 amino acids corresponding to positions 746 to 1639 of SEQ ID NO: 1. Optionally, the Factor VIII nucleotide sequence encodes 88 or fewer, 74 or fewer, 50 or fewer, or 25 or fewer amino acids corresponding to positions 746 to 1639 of SEQ ID NO: 1. Optionally, the Factor VIII nucleotide sequence encodes a maximum of 88 amino acids corresponding to positions 746 to 1639 of SEQ ID NO: 1. Optionally, the Factor VIII nucleotide sequence encodes a maximum of 74 amino acids corresponding to positions 746 to 1639 of SEQ ID NO: 1. Optionally, the Factor VIII nucleotide sequence encodes between one and 89, between one and 75, between one and 50, between one and 25, or between one and 10 amino acids corresponding to positions 746 to 1639 of SEQ ID NO: 1.

[0209] Optionally, the Factor VIII nucleotide sequence encodes a region of the Factor VIII amino acid sequence which does not comprise amino acids corresponding to positions 746 to 1639 of SEQ ID NO: 1. The “Factor VIII nucleotide sequence” which “encode(s) a region of the Factor VIII amino acid sequence which does not comprise amino acids corresponding to positions 746 to 1639 of SEQ ID NO: 1” may comprise any of the nucleotides from the Factor VIII nucleotide sequence which encode any amino acids of the Factor VIII amino acid sequence except for nucleotides which encode the amino acids corresponding to positions 746 to 1639 of SEQ ID NO: 1. Correspondingly, the “region of the Factor VIII amino acid sequence which does not comprise amino acids corresponding to positions 746 to 1639 of SEQ ID NO: 1” may comprise any amino acids of the Factor VIII amino acid sequence except for the amino acids corresponding to positions 746 to 1639 of SEQ ID NO: 1.

[0210] For example, the “Factor VIII nucleotide sequence” may comprise nucleotides which encode one or more amino acids corresponding to positions 1 to 745 of SEQ ID NO: 1. As a further example, the “Factor VIII nucleotide sequence” may comprise nucleotides which encode one or more amino acids corresponding to positions 1640 to 2332 of SEQ ID NO: 1. As yet a further example, the “Factor VIII nucleotide sequence” may comprise nucleotides which encode one or more amino acids corresponding to positions 1 to 745 of SEQ ID NO: 1 and nucleotides which encode one or more amino acids corresponding to 1640 to 2332 of SEQ ID NO: 1.

[0211] As yet a further example, the “Factor VIII nucleotide sequence” may comprise nucleotides which encode one or more amino acids corresponding to positions 1 to 713 of SEQ ID NO: 1. As yet a further example, the “Factor VIII nucleotide sequence” may comprise nucleotides which encode one or more amino acids corresponding to positions 1696 to 2332 of SEQ ID NO: 1. As yet a further example, the “Factor VIII nucleotide sequence” may comprise nucleotides which encode one or more amino acids corresponding to positions 1 to 713 of SEQ ID NO: 1 and nucleotides which encode one or more amino acids corresponding to 1696 to 2332 of SEQ ID NO: 1.

[0212] Optionally, the amino acids of the “region of the Factor VIII amino acid sequence which does not comprise amino acids corresponding to positions 746 to 1639 of SEQ ID NO: 1” are contiguous. Optionally, the amino acids of the “region of the Factor VIII amino acid sequence which does not comprise amino acids corresponding to positions 746 to 1639 of SEQ ID NO: 1” are not contiguous.

[0213] Optionally, the “Factor VIII nucleotide sequence which encodes a region of the Factor VIII amino acid sequence” is codon-optimised as described herein.

[0214] Optionally, the Factor VIII nucleotide sequence may be at least 85.0%, at least 85.5%, at least 86.0%, at least 86.5%, at least 87%, at least 87.5%, at least 88%, at least 90%, at least 92%, at least 95%, at least 98%, at least 99%, or 100% identical to the nucleotides (i.e. the portions) of SEQ ID NO:3-6 (in particular SEQ ID NO:3) which encode a Factor VIII polypeptide of the invention. Optionally the Factor VIII nucleotide sequence may not comprise nucleotides of SEQ ID NO:3-6 (in particular SEQ ID NO:3) which do not encode a Factor VIII polypeptide of the invention. Optionally, the Factor VIII nucleotide sequence may comprise the nucleotides of any one of SEQ ID NOs:3-6 (in particular SEQ ID NO:3) which encode a Factor VIII polypeptide set forth in any one of SEQ ID NOs:9-36. Optionally, the Factor VIII nucleotide sequence may not comprise nucleotides of SEQ ID NO:3-6 (in particular SEQ ID NO:3) which do not encode a Factor VIII polypeptide set forth in any one of SEQ ID NOs:9-36. Optionally, the Factor VIII nucleotide sequence may consist of the nucleotides of SEQ ID NO:3-6 (in particular SEQ ID NO:3) which encode a Factor VIII polypeptide of the invention.

[0215] Optionally, the Factor VIII nucleotide sequence may be at least 88% identical to the nucleotides (i.e. the portions) of SEQ ID NO:3. Optionally, the Factor VIII nucleotide sequence may be at least 89% identical to the nucleotides (i.e. the portions) of SEQ ID NO:3. Optionally, the Factor VIII nucleotide sequence may be at least 88% identical to the nucleotides (i.e. the portions) of SEQ ID NO:3. Optionally, the Factor VIII nucleotide sequence may be at least 90% identical to the nucleotides (i.e. the portions) of SEQ ID NO:3.

[0216] The “Factor VIII nucleotide sequence which encodes a region of the Factor VIII amino acid sequence” may be at least 85.5%, at least 86.0%, at least 88%, at least 90%, at least 92%, at least 95%, at least 98%, at least 99%, or 100% identical to the portion of SEQ ID NO: 3 which encodes the “region of the Factor VIII amino acid sequence”. The “Factor VIII nucleotide sequence which encodes a region of the Factor VIII amino acid sequence” may be at least 85.0%, at least 85.5%, at least 86.0%, at least 88%, at least 90%, at least 92%, at least 95%, at least 98%, at least 99%, or 100% identical to the portion of SEQ ID NO: 4 which encodes the “region of the Factor VIII amino acid sequence”. The “Factor VIII nucleotide sequence which encodes a region of the Factor VIII amino acid sequence” may be at least 85.0%, at least 85.5%, at least 86.0%, at least 88%, at least 90%, at least 92%, at least 95%, at least 98%, at least 99%, or 100% identical to the portion of SEQ ID NO: 5 which encodes the “region of the Factor VIII amino acid sequence”. The “Factor VIII nucleotide sequence which encodes a region of the Factor VIII amino acid sequence” may be at least 86.5%, at least 87.0%, at least 87.5%, at least 88%, at least 90%, at least 92%, at least 95%, at least 98%, at least 99%, or 100% identical to the portion of SEQ ID NO: 6 which encodes the “region of the Factor VIII amino acid sequence”. The “region of the Factor VIII amino acid sequence” may comprise at least 650, at least 700, at least 720, or 745 amino acids corresponding to positions 1 to 745 of SEQ ID NO: 1. The “region of the Factor VIII amino acid sequence” may comprise at least 550, at least 600, at least 650, at least 700, or 712 amino acids corresponding to positions 1640 to 2332 of SEQ ID NO: 1. The “region of the Factor VIII amino acid sequence” may comprises at least 1200, at least 1300, at least 1400, at least 1450, or 1457 amino acids corresponding to positions 1 to 745 and 1640 to 2332 of SEQ ID NO: 1.

[0217] The “region of the Factor VIII amino acid sequence” may comprise amino acids corresponding to positions 714 to 745 of SEQ ID NO: 1 or a fragment thereof. The “region of the Factor VIII amino acid sequence” may comprise at least 10, at least 15, at least 20, at least 25, at least 30, or 32 amino acids corresponding to positions 714 to 745 of SEQ ID NO: 1. The “region of the Factor VIII amino acid sequence” may comprise amino acids corresponding to positions 1640 to 1696 of SEQ ID NO: 1 or a fragment thereof. The “region of the Factor VIII amino acid sequence” may comprise at least 20, at least 25, at least 30, at least 35, at least 40, at least 45, at least 50, at least 55, or 57 amino acids corresponding to positions 1640 to 1696 of SEQ ID NO: 1. The “region of the Factor VIII amino acid sequence” may comprise amino acids corresponding to positions 714 to 745 and 1640 to 1696 of SEQ ID NO: 1 or a fragment thereof. The “region of the Factor VIII amino acid sequence” may comprise at least 30, at least 35, at least 40, at least 45, at least 50, at least 55, at least 60, at least 65, at least 70, at least 75, at least 80, at least 85, or 89 amino acids corresponding to positions 714 to 745 and 1640 to 1696 of SEQ ID NO: 1.

[0218] Optionally, the “region of the Factor VIII amino acid sequence” does not comprise the modified BDR region. The “region of the Factor VIII amino acid sequence” may comprise at least 650, at least 700, at least 710, or 713 amino acids corresponding to positions 1 to 713 of SEQ ID NO: 1. The “region of the Factor VIII amino acid sequence” may comprise at least 550, at least 600, at least 650, or 655 amino acids corresponding to positions 1697 to 2332 of SEQ ID NO: 1. The “region of the Factor VIII amino acid sequence” may comprise at least 1200, at least 1300, at least 1350, or 1368 amino acids corresponding to positions 1 to 713 and 1697 to 2332 of SEQ ID NO: 1.

[0219] The portion of the Factor VIII nucleotide sequence that is codon-optimised may be at least 1500, at least 2000, at least 2500, at least 3000, at least 3500, at least 4000, at least 4100, at least 4200, at least 4300, or at least 4350 nucleotides in length. The portion of the Factor VIII nucleotide sequence that is codon-optimised may be 4371 or fewer nucleotides in length. The portion of the Factor VIII nucleotide sequence that is codon-optimised may be between 1500 and 4372, between 2500 and 4372, between 3500 and 4372, between 4000 and 4372, or around 4371 nucleotides in length.

[0220] The portion of the Factor VIII nucleotide sequence that is codon-optimised may be at least 1500, at least 2000, at least 2500, at least 3000, at least 3500, at least 4000, or at least 4100 nucleotides in length. The portion of the Factor VIII nucleotide sequence that is codon-optimised may be 4104 or fewer nucleotides in length. The portion of the Factor VIII nucleotide sequence that is codon-optimised may be between 1500 and 4105, between 2500 and 4105, between 3500 and 4105, between 4000 and 4105, or around 4104 nucleotides in length.

[0221] The portion of the Factor VIII nucleotide sequence that is codon-optimised may encode a mature Factor VIII polypeptide. Optionally, the portion of the Factor VIII nucleotide sequence that is codon-optimised does not encode all or a portion of a signal peptide. The portion of the Factor VIII nucleotide sequence that is codon-optimised may encode all or a portion of a signal peptide.

[0222] A codon-optimised nucleotide sequence may comprise at least one more “preferred” codons than a corresponding nucleotide sequence which is not codon-optimised. A codon-optimised nucleotide sequence may comprise a higher percentage of “preferred” codons than a corresponding nucleotide sequence which is not codon-optimised. A codon-optimised nucleotide sequence may comprise at least one fewer “non-preferred” codons than a corresponding nucleotide sequence which is not codon-optimised. A codon-optimised nucleotide sequence may comprise a lower percentage of “non-preferred” codons than a corresponding nucleotide sequence which is not codon-optimised. Preferred codons for expression of Factor VIII in human liver cells are underlined in Table 1.

[0223] In the portion of the Factor VIII amino acid sequence that is codon-optimised, at least 50%, at least 55%, at least 60%, at least 61%, at least 62%, at least 63%, at least 64%, at least 65%, at least 69%, at least 70%, at least 75%, or at least 78% of the codons may be selected from the group consisting of: TTC, CTG, ATC, GTG, TCC, AGT, AGC, CCT, CCC, ACC, ACA, GCC, TAC, CAC, CAG, AAC, AAG, GAC, GAG, TGT, AGA, and GGC. Preferably, at least 60% of the codons are selected from the above group.

[0224] Optionally, the Factor VIII nucleotide sequence may comprise more codons encoding phenylalanine than a non-codon-optimised nucleotide sequence which are TTC. Optionally the Factor VIII nucleotide sequence may comprise fewer codons encoding phenylalanine than a non-codon-optimised sequence which are TTT.

[0225] Optionally, the Factor VIII nucleotide sequence may comprise more codons encoding leucine than a non-codon-optimised nucleotide sequence which are CTG. Optionally, the Factor VIII nucleotide sequence may comprise fewer codons encoding leucine than a non-codon-optimised sequence which are TTA, TTG, CTT, CTC or CTA. Optionally, the Factor VIII nucleotide sequence may comprise no codons encoding leucine which are TTA. Optionally, the Factor VIII nucleotide sequence may comprise no codons encoding leucine which are TTG. Optionally, the Factor VIII nucleotide sequence may comprise no codons encoding leucine which are CTC. Optionally, the Factor VIII nucleotide sequence may comprise no codons encoding leucine which are CTA.

[0226] Optionally, the Factor VIII nucleotide sequence may comprise more codons encoding isoleucine than a non-codon-optimised nucleotide sequence which are ATC. Optionally, the Factor VIII nucleotide sequence may comprise fewer codons encoding isoleucine than a non-codon-optimised sequence which are ATT or ATA. Optionally, the Factor VIII nucleotide sequence may comprise no codons encoding isoleucine which are ATA.

[0227] Optionally, the Factor VIII nucleotide sequence may comprise more codons encoding valine than a non-codon-optimised nucleotide sequence which are GTG. Optionally, the Factor VIII nucleotide sequence may comprise fewer codons encoding valine than a non-codon-optimised sequence which are GTT, GTC or GTA. Optionally, the Factor VIII nucleotide sequence may comprise no codons encoding valine which are GTC. Optionally, the Factor VIII nucleotide sequence may comprise no codons encoding valine which are GTA.

[0228] Optionally, the Factor VIII nucleotide sequence may comprise more codons encoding serine than a non-codon-optimised nucleotide sequence which are TCC, AGT or AGC. Optionally, the Factor VIII nucleotide sequence may comprise fewer codons encoding serine than a non-codon-optimised sequence which are TCT, TCA or TCG. Optionally, the Factor VIII nucleotide sequence may comprise no codons encoding serine which are TCA. Optionally, the Factor VIII nucleotide sequence may comprise no codons encoding serine which are TCG.

[0229] Optionally, the Factor VIII nucleotide sequence may comprise more codons encoding proline than a non-codon-optimised nucleotide sequence which are CCT or CCC. Optionally, the Factor VIII nucleotide sequence may comprise fewer codons encoding proline than a non-codon-optimised sequence which are CCA or CCG. Optionally, the Factor VIII nucleotide sequence may comprise no codons encoding proline which are CCG.

[0230] Optionally, the Factor VIII nucleotide sequence may comprise more codons encoding threonine than a non-codon-optimised nucleotide sequence which are ACC or ACA. Optionally, the Factor VIII nucleotide sequence may comprise fewer codons encoding threonine than a non-codon-optimised sequence which are ACT or ACG. Optionally, the Factor VIII nucleotide sequence may comprise no codons encoding threonine which are ACT.

[0231] Optionally, the Factor VIII nucleotide sequence may comprise more codons encoding alanine than a non-codon-optimised nucleotide sequence which are GCC. Optionally, the Factor VIII nucleotide sequence may comprise fewer codons encoding alanine than a non-codon-optimised sequence which are GCT, GCA or GCG. Optionally, the Factor VIII nucleotide sequence may comprise no codons encoding alanine which are GCG.

[0232] Optionally, the Factor VIII nucleotide sequence may comprise more codons encoding tyrosine than a non-codon-optimised nucleotide sequence which are TAC. Optionally, the Factor VIII nucleotide sequence may comprise fewer codons encoding phenylalanine than a non-codon-optimised sequence which are TAT.

[0233] Optionally, the Factor VIII nucleotide sequence may comprise more codons encoding histidine than a non-codon-optimised nucleotide sequence which are CAC. Optionally, the Factor VIII nucleotide sequence may comprise fewer codons encoding histidine than a non-codon-optimised sequence which are CAT.

[0234] Optionally, the Factor VIII nucleotide sequence may comprise more codons encoding glutamine than a non-codon-optimised nucleotide sequence which are CAG. Optionally, the Factor VIII nucleotide sequence may comprise fewer codons encoding glutamine than a non-codon-optimised sequence which are CAA.

[0235] Optionally, the Factor VIII nucleotide sequence may comprise more codons encoding asparagine than a non-codon-optimised nucleotide sequence which are AAC. Optionally, the Factor VIII nucleotide sequence may comprise fewer codons encoding asparagine than a non-codon-optimised sequence which are AAT.

[0236] Optionally, the Factor VIII nucleotide sequence may comprise more codons encoding lysine than a non-codon-optimised nucleotide sequence which are AAG. Optionally, the Factor VIII nucleotide sequence may comprise fewer codons encoding lysine than a non-codon-optimised sequence which are AAA.

[0237] Optionally, the Factor VIII nucleotide sequence may comprise more codons encoding aspartic acid than a non-codon-optimised nucleotide sequence which are GAT. Optionally, the Factor VIII nucleotide sequence may comprise fewer codons encoding aspartic acid than a non-codon-optimised sequence which are GAC.

[0238] Optionally, the Factor VIII nucleotide sequence may comprise more codons encoding aspartic acid than a non-codon-optimised nucleotide sequence which are GAC. Optionally, the Factor VIII nucleotide sequence may comprise fewer codons encoding aspartic acid than a non-codon-optimised sequence which are GAT.

[0239] Optionally, the Factor VIII nucleotide sequence may comprise more codons encoding glutamic acid than a non-codon-optimised nucleotide sequence which are GAG. Optionally, the Factor VIII nucleotide sequence may comprise fewer codons encoding glutamic acid than a non-codon-optimised sequence which are GAA.

[0240] Optionally, the Factor VIII nucleotide sequence may comprise more codons encoding cysteine than a non-codon-optimised nucleotide sequence which are TGT. Optionally, the Factor VIII nucleotide sequence may comprise fewer codons encoding cysteine than a non-codon-optimised sequence which are TGC.

[0241] Optionally, the Factor VIII nucleotide sequence may comprise more codons encoding arginine than a non-codon-optimised nucleotide sequence which are AGA. Optionally, the Factor VIII nucleotide sequence may comprise fewer codons encoding arginine than a non-codon-optimised sequence which are CGT, CGC, CGA, CGG or AGG. Optionally, the Factor VIII nucleotide sequence may comprise no codons encoding arginine which are CGC. Optionally, the Factor VIII nucleotide sequence may comprise no codons encoding arginine which are CGG.

[0242] Optionally, the Factor VIII nucleotide sequence may comprise more codons encoding glycine than a non-codon-optimised nucleotide sequence which are GGC. Optionally, the Factor VIII nucleotide sequence may comprise fewer codons encoding glycine than a non-codon-optimised sequence which are GGT, GGA or GGG. Optionally, the Factor VIII nucleotide sequence may comprise no codons encoding glycine which are GGT. Optionally, the Factor VIII nucleotide sequence may comprise no codons encoding glycine which are GGG.

[0243] A polypeptide encoded by the Factor VIII nucleotide sequence may be expressed in human liver cells at higher levels compared to a reference wild-type Factor VIII nucleotide sequence.

[0244] Thus the Factor VIII polypeptide encoded by the Factor VIII nucleotide sequence may be expressed at a higher level than a polypeptide encoded by a wild-type Factor VIII nucleotide sequence when the sequences are expressed in human liver cells. For example, a polypeptide encoded by the Factor VIII nucleotide sequence may be expressed in human liver cells at least 1.1 fold, at least 1.2 fold, at least 1.5 fold, at least 1.8 fold, at least 2 fold, at least 5 fold, at least 10 fold, at least 20 fold, at least 30 fold, at least 40 fold, or at least 50 fold higher compared to a reference wild-type Factor VIII nucleotide sequence. The “reference wild-type Factor VIII nucleotide sequence” may be any Factor VIII nucleotide sequence that uses wild type codons to encode a Factor VIII polypeptide (which may itself be a wild-type Factor VIII polypeptide or may be a modified Factor VIII polypeptide such as a Factor VIII polypeptide of the invention comprising a modified BDR), such as the Factor VIII nucleotide sequence of SEQ ID NO: 2. The reference wild-type Factor VIII nucleotide is an “equivalent” factor VIII nucleotide sequence i.e. the reference wild-type Factor VIII nucleotide encodes the same Factor VIII polypeptide as the Factor VIII polynucleotide to which it is being compared.

[0245] The Factor VIII polypeptide encoded by the Factor VIII nucleotide sequence may be expressed in human liver cells at at least 50%, at least 60%, at least 70%, at least 75%, at least 80%, at least 85%, at least 90%, at least 95%, at least 98%, at least 99%, or at least 100% of the level expressed by a the Factor VIII encoded by the polynucleotide of SEQ ID NO: 3. The Factor VIII polypeptide encoded by the Factor VIII nucleotide sequence may be expressed in human liver cells at at least 50%, at least 60%, at least 70%, at least 75%, at least 80%, at least 85%, at least 90%, at least 95%, at least 98%, at least 99%, or at least 100% of the level expressed by a the Factor VIII polypeptide encoded by the polynucleotide of SEQ ID NO: 4. The Factor VIII polypeptide encoded by the Factor VIII nucleotide sequence may be expressed in human liver cells at at least 50%, at least 60%, at least 70%, at least 75%, at least 80%, at least 85%, at least 90%, at least 95%, at least 98%, at least 99%, or at least 100% of the level expressed by the Factor VIII polypeptide encoded by the polynucleotide of SEQ ID NO: 5. The Factor VIII polypeptide encoded by the Factor VIII nucleotide sequence may be expressed in human liver cells at at least 50%, at least 60%, at least 70%, at least 75%, at least 80%, at least 85%, at least 90%, at least 95%, at least 98%, at least 99%, or at least 100% of the level expressed by the Factor VIII polypeptide encoded by the polynucleotide of SEQ ID NO: 6.

[0246] The Factor VIII nucleotide sequence encoding the Factor VIII amino acid sequence may comprise or consist of a sequence that is at least 85.5%, at least 86.0%, at least 88%, at least 90%, at least 92%, at least 95%, at least 98%, at least 99%, or 100% identical to the portion of SEQ ID NO: 3 which encodes the Factor VIII amino acid sequence. The Factor VIII nucleotide sequence encoding the Factor VIII amino acid sequence may comprise or consist of a sequence that is at least 85.5%, at least 86.0%, at least 88%, at least 90%, at least 92%, at least 95%, at least 98%, at least 99%, or 100% identical to SEQ ID NO: 3. The Factor VIII nucleotide sequence encoding the Factor VIII amino acid sequence may comprise or consist of the sequence of SEQ ID NO: 3.

[0247] The Factor VIII nucleotide sequence encoding the Factor VIII amino acid sequence may comprise or consist of a sequence that is at least 85.0%, at least 85.5%, at least 86.0%, at least 88%, at least 90%, at least 92%, at least 95%, at least 98%, at least 99%, or 100% identical to the portion of SEQ ID NO: 4 which encodes the Factor VIII amino acid sequence. The Factor VIII nucleotide sequence encoding the Factor VIII amino acid sequence may comprise or consist of a sequence that is at least 85.0%, at least 85.5%, at least 86.0%, at least 88%, at least 90%, at least 92%, at least 95%, at least 98%, at least 99%, or 100% identical to SEQ ID NO: 4. The Factor VIII nucleotide sequence encoding the Factor VIII amino acid sequence may comprise or consist of the sequence of SEQ ID NO: 4.

[0248] The Factor VIII nucleotide sequence encoding the Factor VIII amino acid sequence may comprise or consist of a sequence that is at least 85.0%, at least 85.5%, at least 86.0%, at least 88%, at least 90%, at least 92%, at least 95%, at least 98%, at least 99%, or 100% identical to the portion of SEQ ID NO: 5 which encodes the Factor VIII amino acid sequence. The Factor VIII nucleotide sequence encoding the Factor VIII amino acid sequence may comprise or consist of a sequence that is at least 85.0%, at least 85.5%, at least 86.0%, at least 88%, at least 90%, at least 92%, at least 95%, at least 98%, at least 99%, or 100% identical to SEQ ID NO: 5. The Factor VIII nucleotide sequence encoding the Factor VIII amino acid sequence may comprise or consist of the sequence of SEQ ID NO: 5.

[0249] The Factor VIII nucleotide sequence encoding the Factor VIII amino acid sequence may comprise or consist of a sequence that is at least 86.5%, at least 87.0%, at least 87.5%, at least 88.0%, at least 90%, at least 92%, at least 95%, at least 98%, at least 99%, or 100% identical to the portion of SEQ ID NO: 6 which encodes the Factor VIII amino acid sequence. The Factor VIII nucleotide sequence encoding the Factor VIII amino acid sequence may comprise or consist of a sequence that is at least 86.5%, at least 87.0%, at least 87.5%, at least 88.0%, at least 90%, at least 92%, at least 95%, at least 98%, at least 99%, or 100% identical to SEQ ID NO: 6. The Factor VIII nucleotide sequence encoding the Factor VIII amino acid sequence may comprise or consist of the sequence of SEQ ID NO: 6.

[0250] The Factor VIII nucleotide sequence encoding the Factor VIII amino acid sequence may comprise or consist of the sequence of SEQ ID NO: 39, SEQ ID NO: 40, SEQ ID NO: 41 or SEQ ID NO: 42. Preferably, the Factor VIII nucleotide sequence encoding the Factor VIII amino acid sequence comprises or consists of the sequence of SEQ ID NO: 39.

[0251] A gain of function mutation —embodiments relating to “one or more substitution mutations”

[0252] It is believed that the dissociation of the respective components of the activated Factor VIII heterotrimeric complex (and in particular, dissociation of the A2 domain from the A1 domain and A3-C1-C2 domains) is one of the principal mechanisms for the loss of Factor VIII activity following activation of the clotting cascade. Without wishing to be bound by theory, it is believed that amino acid substitution mutations disclosed herein may serve to prevent or delay dissociation of the respective components of the Factor VIII heterotrimeric complex following activation of the Factor VIII polypeptide, thereby extending the time for which the active FVIIIa is intact, and thus active.

[0253] Optionally, the Factor VIII polypeptides of the invention may comprise one or more amino acid substitutions (substitution mutations), compared to a corresponding wild-type Factor VIII amino acid sequence, which increase the stability/expression and/or specific activity of the Factor VIII polypeptide relative to a reference Factor VIII polypeptide (e.g. a reference wild-type Factor VIII polypeptide).

[0254] More particularly, the one or more substitution mutation may be located at an inter-domain interface between two domains of the Factor VIII polypeptide. In particular, the one or more substitution mutations may be located at the inter-domain interface selected from the A1/A3 domain interface, the A2/A3 domain interface, or the A1/C2 domain interface. The Factor VIII amino acid sequence therefore may comprise a substitution mutation in the A1, A2, A3 or C2 domain. Three-dimensional crystal structures of Factor VIII are available (for example, the PDB accession numbers 2RZE or 4BDV); and it would therefore be routine to identify amino acids within these domains, and more particularly amino acids which are situated at specified inter-domain interfaces, which may be substituted. With regard to wild-type Factor VIII, the A1 domain consists of amino acids corresponding to positions 1-329 of SEQ ID NO:1; the A2 domain consists of amino acids corresponding to positions 380-711 of SEQ ID NO:1; the A3 domain consists of amino acids corresponding to positions 1694-2021 of SEQ ID NO:1; the C1 domain consists of amino acids corresponding to positions 2021-2169 of SEQ ID NO:1; and the C2 domain consists of amino acids corresponding to positions 2174-2332 of SEQ ID NO:1. The last six amino acids (corresponding to positions 2327 to 2332 of SEQ ID NO: 1) may not be considered part of the C2 domain. Thus, optionally, the C2 domain consists of the amino acids corresponding to positions 2174-2326 of SEQ ID NO: 1.

[0255] Optionally, a Factor VIII polypeptide may comprise a Factor VIII amino acid sequence which comprises one or more substitution mutations at an inter-domain interface selected from the group consisting of:
[0256] a. the A1/A3 domain interface;
[0257] b. the A2/A3 domain interface; or
[0258] c. the A1/C2 domain interface
   wherein:
[0259] (i) the one or more substitution mutations comprises substitution of an amino acid with a more hydrophobic amino acid; or
[0260] (ii) the one or more substitution mutations comprises substitution of a pair of amino acids in the respective domains with cysteine residues;
   and wherein the Factor VIII polypeptide has higher specific activity than a reference wild-type Factor VIII polypeptide.

[0261] Optionally, a Factor VIII polypeptide may comprise a Factor VIII amino acid sequence which comprises one or more substitution mutations at an inter-domain interface selected from the group consisting of:
[0262] a. the A1/A3 domain interface;
[0263] b. the A2/A3 domain interface; or
[0264] c. the A1/C2 domain interface
   wherein:
[0265] (i) the one or more substitution mutations comprises substitution of an amino acid with a more hydrophobic amino acid; or
[0266] (ii) the one or more substitution mutations comprises substitution of a pair of amino acids in respective domains with cysteine residues;
   and wherein the Factor VIII polypeptide has higher stability than a reference wild-type Factor VIII polypeptide.

[0267] Optionally, a Factor VIII polypeptide may comprise a Factor VIII amino acid sequence which comprises one or more substitution mutations at an inter-domain interface selected from the group consisting of:
[0268] a. the A1/A3 domain interface;
[0269] b. the A2/A3 domain interface; or
[0270] c. the A1/C2 domain interface
   wherein:
[0271] (i) the one or more substitution mutations comprises substitution of an amino acid with a more hydrophobic amino acid; or
[0272] (ii) the one or more substitution mutations comprises substitution of a pair of amino acids in respective domains with cysteine residues;
   and wherein the Factor VIII polypeptide is expressed at a higher level in a host cell than a reference wild-type Factor VIII polypeptide.

[0273] Optionally, a Factor VIII polypeptide may comprise a Factor VIII amino acid sequence which comprises one or more substitution mutations selected from the group consisting of:
[0274] a. a substitution of an amino acid corresponding to M662 or H693 of SEQ ID NO: 1; or
[0275] b. a substitution of a pair of amino acids comprising a first amino acid and a second amino acid with cysteine residues, wherein:
   [0276] 1. the first amino acid corresponds to M147, S149 or S289 of SEQ ID NO: 1 and the second amino acid corresponds to E1969, E1970 or N1977 of SEQ ID NO: 1;
   [0277] 2. the first amino acid corresponds to T667, T669, N684, L687, 1689, S695 or F697 of SEQ ID NO: 1 and the second amino acid corresponds to S1791, G1799, A1800, R1803, E1844, S1949, G1981, V1982, or Y1979 of SEQ ID NO: 1; or
   [0278] 3. the first amino acid corresponds to A108, T118 or V137 of SEQ ID NO: 1 and the second amino acid corresponds to N2172, Q2329 or Y2332 of SEQ ID NO: 1.

[0279] In particular embodiments, a Factor VIII polypeptide comprising a Factor VIII amino acid sequence comprising one or more substitution mutations at the A1/A3 domain interface, the A2/A3 domain interface or the A1/C2 domain interface as disclosed herein may have higher specific activity than a reference wild-type Factor VIII polypeptide. Exemplary substitution mutations which increase the specific activity of a Factor VIII polypeptide are disclosed herein.

[0280] Factor VIII is a cofactor for Factor X in the clotting cascade, and once activated acts in combination with activated Factor IX to activate Factor X. Factor VIII does not independently possess enzymatic activity as such. Thus, reference to the activity or specific activity of a Factor VIII polypeptide comprising a Factor VIII amino acid sequence which comprises one or more substitution mutations refers to the observed activity or specific activity in a functional assay for determining the activity of Factor X, in which Factor VIII is able to act as a cofactor for Factor X in combination with Factor IX (i.e. Factor VIII cofactor activity (FVIII:C)). Similarly, reference to a Factor VIII polypeptide comprising a Factor VIII amino acid sequence which comprises one or more substitution mutations having higher activity or specific activity than a reference Factor VIII polypeptide (such as a wild-type Factor VIII polypeptide) refers to the observed activity or specific activity of Factor X in a functional assay being increased for said Factor VIII polypeptide, relative to the observed activity or specific activity of Factor X in said assay for a reference Factor VIII polypeptide.

[0281] For the purposes of determining whether a Factor VIII polypeptide comprising a Factor VIII amino acid sequence comprising one or more substitution mutations has increased specific activity relative to a reference Factor VIII polypeptide such as a reference wild-type Factor VIII polypeptide, the activity of the Factor VIII polypeptide may be measured by a two stage chromogenic Factor Xa assay. For example, a suitable chromogenic assay is as follows. The Factor VIII polypeptide is mixed with human Factor X polypeptide and Factor IXa polypeptide, thrombin, phospholipids and calcium. The thrombin activates the Factor VIII polypeptide to form Factor VIIIa polypeptide. The thrombin-activated Factor VIII polypeptide forms an enzymatic complex with Factor IXa polypeptide, phospholipids and calcium, which enzymatic complex can catalyse the conversion of Factor X polypeptide to Factor Xa polypeptide. The activity of the Factor Xa polypeptide can catalyse cleavage of a chromogenic substrate (e.g. SXa-11) to produce pNA. The level of pNA generated can be measured by determining colour development at 405 nm (e.g. measured by absorbance). Factor X polypeptide, and therefore Factor Xa polypeptide, is provided in excess. Therefore the limiting factor is Factor VIIIa polypeptide. Thus, the level of pNA generated is proportional to the amount of the Factor Xa polypeptide generated by Factor FVIIIa polypeptide in the sample, which is proportional to the activity of Factor FVIIIa polypeptide in the sample. The activity of Factor FVIIIa polypeptide in the sample is a measure of the cofactor activity of the Factor FVIII polypeptide in the sample.

[0282] For example, a suitable chromogenic assay is the BIOPHEN FVIII:C assay (Ref: 221406) manufactured by HYPHEN BioMed as used in the Examples. The activity of the Factor VIII polypeptide may be measured using the BIOPHEN FVIII:C assay. More particularly, the activity of the Factor VIII polypeptide may be measured using the BIOPHEN FVIII:C assay according to the protocol described below in Example 1.

[0283] The Factor VIII polypeptide comprising a Factor VIII amino acid sequence comprising one or more substitution mutations may have a specific activity which is higher than the specific activity of a reference Factor VIII polypeptide (such as a reference wild-type Factor VIII polypeptide). The Factor VIII polypeptide may have a specific activity which is at least 1.1 fold, at least 1.2 fold, at least 1.5 fold, at least 1.7 fold, at least 1.8 fold, at least 2 fold, at least 2.2 fold, at least 2.5 fold, at least 3 fold, at least 3.5 fold, at least 4 fold, at least 4.5 fold, at least 5 fold, or at least 5.5 fold higher than the specific activity of a reference Factor VIII polypeptide. The Factor VIII polypeptide may have a specific activity which is between 1.2 fold and 5.5 fold, or between 1.5 fold and 5 fold, higher than the specific activity of a reference Factor VIII polypeptide. When referring to fold changes of activity, the term “between” includes the specified values. Thus, for example, “between 1.2 fold and 5.5 fold” includes the values 1.2 and 5.5.

[0284] In further embodiments, a Factor VIII polypeptide comprising a Factor VIII amino acid sequence comprising one or more substitution mutations at the A1/A3 domain interface, the A2/A3 domain interface or the A1/C2 domain interface as disclosed herein may have higher stability than a reference wild-type Factor VIII polypeptide.

[0285] A Factor VIII polypeptide having higher stability than a reference Factor VIII polypeptide retains a higher proportion of its Factor VIII activity over time than a reference Factor VIII polypeptide. The Factor VIII polypeptide of the invention may have a higher stability than a reference Factor VIII polypeptide prior to being activated, i.e. the Factor VIII polypeptide may have higher stability in its inactive form than a reference Factor VIII polypeptide in its inactive form. Put another way, an inactive Factor VIII polypeptide of the invention may have a higher stability than an inactive reference Factor VIII polypeptide. Alternatively or additionally, the Factor VIII polypeptide of the invention may have a higher stability than a reference Factor VIII polypeptide when activated. Put another way, an active Factor VIII polypeptide of the invention may have a higher stability than an active reference Factor VIII polypeptide.

[0286] A Factor VIII polypeptide comprising a Factor VIII amino acid sequence comprising one or more substitution mutations may have higher stability than a reference Factor VIII polypeptide prior to activation. A higher proportion of a Factor VIII polypeptide having a higher stability prior to activation than a reference Factor VIII polypeptide may remain capable of being activated over time than a reference Factor VIII polypeptide. Stability of a Factor VIII polypeptide prior to activation may be determined by measuring residual Factor VIII activity in a sample over time. Aliquots of a sample containing inactivated Factor VIII polypeptide may be removed at suitable time points, and Factor VIII polypeptide activity may be determined by activating the Factor VIII polypeptide in an aliquot and performing a two stage Factor X chromogenic assay as described herein. Activity at a given time point may then be compared to the initial Factor VIII activity of the sample (i.e. by determining Factor VIII activity at an initial time point), and the residual Factor VIII activity may be calculated as a percentage of the initial Factor VIII activity. Thus, when activated, the Factor VIII polypeptide having higher stability prior to activation than a reference Factor VIII polypeptide will have a higher residual activity (i.e. as a percentage of the initial Factor VIII polypeptide activity) than the reference Factor VIII polypeptide.

[0287] Optionally, residual activity of an inactive Factor VIII polypeptide in a sample may be measured over the course of five, ten, fifteen, twenty, twenty-five, thirty, forty-five or sixty minutes, or over the course of 2 hours, 3 hours, 4 hours, 5 hours, 6 hours, 7 hours, 8 hours, 9 hours, 10 hours, 11 hours, 12 hours, 18 hours or 24 hours, or over the course of 2 days, 3 days, 4 days, 5 days, 6 days or 7 days. Aliquots of a sample may be taken at a series of time points, e.g. two or more, three or more, four or more, five or more or six or more time points, in addition to taking an aliquot of the sample at an initial time point and Factor VIII activity in each aliquot may be determined. Comparing Factor VIII activity at each time point with Factor VIII activity at the initial time point allows residual Factor VIII activity to be determined. Optionally, specific activity may be determined at each time point.

[0288] A Factor VIII polypeptide comprising a Factor VIII amino acid sequence comprising one or more substitution mutations may have higher stability than a reference Factor VIII polypeptide when activated. A Factor VIII polypeptide having a higher stability when activated than a reference FVIII polypeptide may retain a higher proportion of its Factor VIII activity over time than a reference Factor VIII polypeptide following activation. Stability of a Factor VIII polypeptide following activation may be determined by measuring Factor VIII polypeptide activity in a sample over time, i.e. in a FVIIIa activity decay assay. A Factor VIII polypeptide may be activated using thrombin for 1 minute at 23° C. and immediately quenched using hirudin to inactivate thrombin. Aliquots may be removed at suitable time points and the activity may be determined using a Factor X chromogenic assay.

[0289] Optionally, activity of an active Factor VIII polypeptide in a sample may be measured over the course of five, ten, fifteen, twenty, twenty-five or thirty minutes following activation. Activity may be determined at a series of time points, e.g. two or more, three or more, four or more, five or more or six or more time points following activation, in addition to determining the activity of Factor VIII in a sample following activation (e.g. immediately following activation). By way of representative example, the activity of Factor VIII in a sample may be determined immediately following activation, and further measurements may be taken at a series of up to six time points within twenty minutes of activation. Optionally, specific activity may be determined at each time point.

[0290] A Factor VIII polypeptide comprising a Factor VIII amino acid sequence comprising one or more substitution mutations having higher stability than a reference Factor VIII polypeptide may have a longer half-life relative to a reference Factor VIII polypeptide. Optionally, the Factor VIII polypeptide has a longer half-life than a reference Factor VIII polypeptide prior to activation. Optionally, the Factor VIII polypeptide has a longer half-life than a reference Factor VIII when activated. Optionally, the Factor VIII polypeptide has a half-life which is at least 1.1, at least 1.2, at least 1.5, at least 1.7, at least 1.8, at least 2, at least 2.2, at least 2.5, at least 2.8 or at least 3 times the half-life of a reference wild-type Factor VIII polypeptide. Optionally, the Factor VIII polypeptide has a half-life when activated which is at least 1.1, at least 1.2, at least 1.5, at least 1.7, at least 1.8, at least 2, at least 2.2, at least 2.5, at least 2.8 or at least 3 times the half-life of a reference Factor VIII polypeptide when activated.

[0291] Optionally, the Factor VIII polypeptide has a half-life when activated with is between 1.1 and 3, between 1.2 and 3, between 1.5 and 3, between 1.7 and 3, between 1.8 and 3, between 2 and 3, between 2.2 and 3, between 2.5 and 3, or between 2.8 and 3 times the half-life of a reference Factor VIII polypeptide when activated. Optionally, the Factor VIII polypeptide comprising a Factor VIII amino acid sequence comprising one or more substitution mutations may have higher stability in a liquid (i.e. when in solution). Optionally, the Factor VIII polypeptide has a longer half-life in a liquid. Optionally, the liquid is conditioned medium, such as conditioned medium in which a host cell expressing a Factor VIII polypeptide is cultured. Optionally, the liquid is a biological sample. A biological sample may be blood, serum or plasma. Optionally, the Factor VIII polypeptide may have higher stability in plasma. Optionally, the Factor VIII polypeptide may have a longer half-life in plasma.

[0292] In yet further embodiments, a Factor VIII polypeptide comprising a Factor VIII amino acid sequence comprising a substitution of one or more amino acids at the A1/A3 domain interface, the A2/A3 domain interface or the A1/C2 domain interface as disclosed herein may be expressed at a higher level in a host cell than a reference Factor VIII polypeptide. For example, a Factor VIII polypeptide comprising the substitution may be expressed at least 1.1 fold, at least 1.2 fold, at least 1.5 fold, at least 1.8 fold, at least 2 fold, at least 2.5 fold, at least 3 fold, at least 3.5 fold, at least 4 fold, at least 4.5 fold or at least 5 fold higher compared to a reference Factor VIII polypeptide. Optionally, the Factor VIII polypeptide comprising the substitution may be expressed between 1.1 fold and 5 fold, between 1.2 fold and 5 fold, between 1.5 fold and 5 fold, between 1.8 fold and 5 fold, between 2 fold and 5 fold, between 2.5 fold and 5 fold, between 3 fold and 5 fold, between 3.5 fold and 5 fold, between 4 fold and 5 fold or between 4.5 fold and 5 fold higher compared to a reference Factor VIII polypeptide. Optionally, the Factor VIII polypeptide is secreted by a host cell at a higher level than a reference Factor VIII polypeptide.

[0293] The level of expression of a Factor VIII polypeptide (and therefore whether a Factor VIII polypeptide comprising a Factor VIII amino acid sequence comprising one or more substitution mutations is expressed at a higher level in a host cell than a referenced wild-type Factor VIII polypeptide) may typically be determined by measuring the level of Factor VIII polypeptide in a sample. The level of expression of a Factor VIII polypeptide of the invention in a host cell may be compared with the level of expression of a reference Factor VIII polypeptide in a host cell. This may be determined quantitatively. For example, the level of expression of a Factor VIII polypeptide may be determined by an ELISA assay as described above. Alternatively, the level of expression of a Factor VIII polypeptide may be determined semi-quantitatively, for example, by SDS-PAGE electrophoresis or by Western blot. In certain embodiments, expression in plasma can be determined by the Asserachrom assay as described in the Examples.

[0294] The level of expression of a Factor VIII polypeptide that is secreted by a host cell is typically determined, i.e. in contrast to the level of the Factor VIII polypeptide that is retained intracellularly by a host cell. This may be determined, for example, by separating cells (e.g. host cells) from a liquid containing the Factor VIII polypeptide (e.g. a biological sample, such as blood, serum or plasma, or culture medium such as conditioned medium in which a host cell expressing a Factor VIII polypeptide is cultured) and determining the level of expression of a Factor VIII polypeptide in the liquid. Cells may be separated, for example, by centrifugation or filtration, and/or the liquid may be decanted (e.g. by pipetting) from the cells. The level of expression of a Factor VIII polypeptide may be determined in a biological sample, such as blood, serum or plasma, or may be determined in a culture medium, such as conditioned medium in which a host cell expressing a Factor VIII polypeptide is cultured.

[0295] A host cell may be any eukaryotic host cell expressing a Factor VIII polypeptide comprising a Factor VIII amino acid sequence comprising one or more substitution mutations (or a reference Factor VIII polypeptide). Optionally, the host cell may be an insect cell expressing a Factor VIII polypeptide. Typically, the host cell may be a mammalian host cell expressing a Factor VIII polypeptide. Mammalian host cells include human, dog, pig, mouse, hamster, or guinea pig cells. More particularly, the host cell may be a mammalian liver cell, and more particularly may be a human liver cell. Optionally, the host cell may be an Huh7 cell. Optionally, the host cell may be a host cell within an organism. Optionally, expression may be in vivo expression. Optionally, expression may be in vivo expression and expression in plasma may be determined.

[0296] The Factor VIII polypeptides comprising a Factor VIII amino acid sequence comprising one or more substitution mutations may have higher specific activity and/or stability and/or may be expressed at a higher level in a host cell than a reference Factor VIII polypeptide. Optionally, the reference Factor VIII polypeptide may be a wild-type Factor VIII polypeptide, i.e. the reference Factor VIII polypeptide may be a reference wild-type Factor VIII polypeptide. The “reference wild-type Factor VIII polypeptide” may be any wild-type Factor FVIII polypeptide, such as the Factor VIII polypeptide of SEQ ID NO: 1. Optionally, the reference Factor VIII polypeptide is a beta domain deleted Factor VIII polypeptide. Optionally, the reference Factor VIII polypeptide has an amino acid sequence set forth in SEQ ID NOs: 7 or 8. Optionally, the reference Factor VIII polypeptide comprises the Factor VIII amino acid sequence of the Factor VIII polypeptide comprising a Factor VIII amino acid sequence comprising one or more substitution mutations, but does not comprise the one or more substitution mutations.

[0297] The one or more substitution mutations may comprise substitution of an amino acid at an inter-domain interface with a more hydrophobic amino acid. Biophysical studies have been performed to establish the hydrophobicity of the twenty naturally occurring amino acids, or more particularly, the relative hydrophobicity of the amino acids, and hydrophobicity scales list the hydropathy of each of the amino acids. One such example is the Wimley-White whole-residue hydrophobicity scale, which calculates the free energy of transfer of an amino acid from an aqueous phase to a non-aqueous phase (octanol). The term “a more hydrophobic amino acid” refers to an amino acid which has a more favourable (more negative AG) free energy value for the transition from an aqueous phase to octanol according to the Wimley-White hydrophobicity scale. The free energy for the aqueous phase to octanol transition is shown in Table 3 below, and is shown graphically in FIG. 13. Starting with the most hydrophobic amino acid, the Wimley-White hydrophobicity scale lists the hydrophobicity of amino acids in the following order: tryptophan, phenylalanine, leucine, isoleucine, tyrosine, methionine, valine, cysteine, glutamic acid (uncharged), histidine (uncharged), proline, threonine, aspartic acid (uncharged), serine, alanine, glutamine, asparagine, glycine, arginine (positively charged), histidine (positively charged), lysine (positively charged), glutamic acid (negatively charged), aspartic acid (negatively charged).

TABLE 3
Wimley-White whole residue hydrophobicity
scale for water to octanol transition.

| Amino | Octanol Scale |
|---|---|
| acid | ΔG w-oct (kcal/mol) |
| Trp | −2.09 |
| Phe | −1.71 |
| Leu | −1.25 |
| Ile | −1.12 |
| Tyr | −0.71 |
| Met | −0.67 |
| Val | −0.46 |
| Cys | −0.02 |
| Glu | 0.11 |
| His | 0.11 |
| Pro | 0.14 |
| Thr | 0.25 |
| Asp | 0.43 |
| Ser | 0.46 |
| Ala | 0.5 |
| Gln | 0.77 |
| Asn | 0.85 |
| Gly | 1.15 |
| Arg+ | 1.81 |
| His+ | 2.33 |
| Lys+ | 2.8 |
| Glu− | 3.63 |
| Asp− | 3.64 |

[0298] The one or more substitution mutations may stabilise the interaction between two or more of the domains of a Factor VIII polypeptide. For example, the one or more substitution mutations at an inter-domain interface may stabilise the interaction between the respective domains of the Factor VIII polypeptide. In particular, one or more substitution mutations at the A1/A3 inter-domain interface may stabilise the interaction of the A1 and A3 domains, one or more substitution mutations at the A2/A3 inter-domain interface may stabilise the interaction of the A2 and A3 domains and one or more substitution mutations at the A1/C2 inter-domain interface may stabilise the interaction of the A1 and C2 domains. Optionally, the one or more substitution mutations of the invention may stabilise the interaction of the respective domains of a Factor VIII polypeptide when activated. In particular, the one or more substitution mutations of the invention may stabilise the interaction of the A1 and A3 domains, the A2 and A3 domains, and/or the A1 and C2 domains (i.e. of the respective domains) of the Factor VIII polypeptide when activated.

[0299] Optionally, the one or more substitution mutations may stabilise the interaction of the A1 domain, the A2 domain, and the A3-C1-C2 domains of the activated Factor VIII heterotrimeric complex. Optionally, the one or more substitution mutations may stabilise the interaction of the A2 domain with the A1 domain and A3-C1-C2 domains of the activated Factor VIII heterotrimeric complex. Optionally, the one or more substitution mutations may prevent or delay dissociation of the A2 domain from the A1 domain and A3-C1-C2 domains of the activated Factor VIII heterotrimeric complex.

[0300] The interaction of the A1 domain, A2 domain, and A3-C1-C2 domains of Factor VIII may be determined by surface plasmon resonance (SPR, or Biacore). Different components may be isolated separately, and one of the domains may be immobilised on the surface of an SPR chip; following immobilisation, the other domains may be injected into a flow cell and the binding and dissociation kinetics (kₒₙ and k_{off}) for the interaction of the domains may be monitored over time. Alternatively, inactive Factor VIII may be immobilised on an SPR chip and thrombin may be injected into a flow cell to activate Factor VIII; a drop in signal may be monitored over time, which represents the dissociation (loss of mass) of the respective components of the Factor VIII heterotrimeric complex (k_{off}). By either means, comparison with a reference Factor VIII polypeptide (e.g. a reference wild-type Factor VIII polypeptide) allows the stability of the interaction of the domains to be determined. The use of surface plasmon resonance to determine the stability of FVIIIa is described in Gale et al. 2006. Journal of Thrombosis and Haemostasis 4, 1315-1322.

[0301] Inter-domain interactions within a polypeptide are typically mediated by interactions between amino acid side chains in each of the respective domains. Interactions between the amino acid side-chains in respective domains may be non-covalent interactions. Alternatively, the amino acid side-chains in respective domains may form a covalent bond (e.g. a disulphide bond). The interaction between the domains of the Factor VIII polypeptide may therefore be stabilised (i.e. relative to a reference Factor VIII polypeptide) by amino acid substitution(s) (substitution mutations) which stabilise the interaction of the respective domains (e.g. the A1 and A3, A2 and A3 or A1 and C2 domains) of the Factor VIII polypeptide.

[0302] The side chains of aromatic amino acids phenylalanine, tyrosine, histidine and tryptophan may interact with one-another by pi-stacking interactions. In pi-stacking interactions, pairs of aromatic side-chains may typically align their respective aromatic rings in an off-centred parallel orientation. Alternatively, pairs of aromatic side-chains may align their respective aromatic rings in a T-shaped, perpendicular orientation to one-another. Optionally, the Factor VIII polypeptide may comprise a Factor VIII amino acid sequence which comprises one or more substitution mutations which increases pi-stacking interactions between amino acid side-chains of the respective domains.

[0303] The side chains of hydrophobic amino acids glycine, alanine, valine, isoleucine, leucine, phenylalanine, tryptophan, tyrosine and methionine typically cluster together within the hydrophobic core of a protein. Minimising the number of hydrophobic side chains exposed to water is a principal driving force behind protein folding, and hydrophobic packing contributes to stabilising protein structure. Conversely, the side chains of charged and polar amino acids are situated on the water-exposed surface of the protein where they interact with the surrounding water molecules. Optionally, the Factor VIII polypeptide may comprise a Factor VIII amino acid sequence which comprises one or more substitution mutations which increases hydrophobic packing between the amino acid side-chains of the respective domains (i.e. providing a more hydrophobic environment for the side chains of aliphatic/hydrophobic amino acids to interact with one another and more efficiently exclude water.

[0304] Optionally, the one or more substitution mutations comprises substitution of a charged or polar amino acid at an inter-domain interface with a hydrophobic amino acid. Optionally, the one or more substitution mutations comprises substitution of a charged or polar amino acid at an inter-domain interface with glycine, alanine, valine, isoleucine, leucine, phenylalanine, tryptophan, tyrosine or methionine. Optionally, the one or more substitution mutations comprises substitution of a hydrophobic amino acid at an inter-domain interface with a more hydrophobic amino acid.

[0305] Amino acid side chains in the respective domains may interact with one another in an unfavourable manner, due to the orientation of the respective domains relative to one-another. For example, amino acid side chains may be forced to adopt an energetically unfavourable conformation due to the orientation of the respective domains relative to one-another (steric clashing). Alternatively, an amino acid side chain may be positioned in proximity to a similarly charged amino acid side chain in another domain (an unfavourable electrostatic interaction).

[0306] Optionally, the one or more substitution mutations may eliminate unfavourable interactions between the amino acid side-chains of the respective domains. Optionally, the one or more substitution mutations may reduce steric clashing between amino acid side chains of the respective domains. Optionally, the one or more substitution mutations to reduce steric clashing may comprise substitution of a large hydrophobic amino acid with a smaller amino acid. Optionally, the one or more substitution mutations may comprise substitution of a large hydrophobic amino acid with isoleucine, leucine, valine, alanine or glycine. Optionally, the large hydrophobic amino acid is an aromatic amino acid. Optionally, the one or more substitution mutations may reduce unfavourable electrostatic interactions between amino acid side chains of the respective domains. Optionally, the one or more substitution mutations may comprise substitution of a positively charged amino acid. Optionally, the one or more substitution mutations may comprise substitution of a positively charged amino acid with a negatively charged amino acid. Optionally, the negatively charged amino acid is aspartic acid or glutamic acid. Optionally, the one or more substitution mutations may comprise substitution of a negatively charged amino acid. Optionally, the one or more substitution mutations may comprise substitution of a negatively charged amino acid with a positively charged amino acid. Optionally, the positively charged amino acid is arginine or lysine. Optionally, the one or more substitution mutations may comprise substitution of a charged amino acid with an uncharged amino acid. Optionally, the uncharged amino acid may be a polar amino acid. Optionally, the uncharged amino acid may be asparagine or glutamine. Optionally, the uncharged amino acid may be serine or threonine. Optionally, the uncharged amino acid may be valine, isoleucine, leucine, alanine or glycine.

[0307] Optionally, the one or more substitution mutation may comprise a substitution of one or more surface-inaccessible amino acids at an inter-domain interface. Three-dimensional crystal structures of Factor VIII are available (for example, the PDB accession numbers 2RZE or 4BDV); and it would therefore be routine to identify amino acids at an inter-domain interface which are surface-inaccessible. Optionally, the surface-inaccessible amino acid is surface-inaccessible in a Factor VIII polypeptide when activated.

[0308] The Factor VIII polypeptide may comprise a Factor VIII amino acid sequence which comprises one or more substitution mutations at an inter-domain interface selected from the A1/A3 interface, the A2/A3 interface, or the A1/C2 interface, wherein the amino acid which is substituted is methionine or histidine. Methionine or histidine residues at these inter-domain interfaces may be identified, for example, from a three-dimensional crystal structure of Factor VIII. Optionally, the methionine or histidine may be substituted with a more hydrophobic amino acid. Optionally, a methionine residue may be substituted with tyrosine, isoleucine, leucine, phenylalanine or tryptophan. Optionally, a histidine residue may be substituted with glutamic acid, cysteine, valine, methionine, tyrosine, isoleucine, leucine, phenylalanine or tryptophan. Optionally, the Factor VIII amino acid sequence may comprise one or more substitution mutations, wherein the amino acid which is substituted is the methionine residue corresponding to the amino acid at position 662 of SEQ ID NO: 1 (M662), or the histidine residue corresponding to the amino acid at position 693 of SEQ ID NO:1 (11693). Optionally, M662 may be substituted with alanine, cysteine, glutamic acid, glycine or serine. Optionally, H693 may be substituted with arginine. Optionally, M662 or H693 may be substituted with a more hydrophobic amino acid. Optionally, M662 may be substituted with tyrosine, isoleucine, leucine, phenylalanine or tryptophan. Optionally, H693 may be substituted with glutamic acid, cysteine, valine, methionine, tyrosine, isoleucine, leucine, phenylalanine or tryptophan.

[0309] It is within the capabilities of the person skilled in the art to determine the residue which “corresponds to” a particular amino acid of SEQ ID NO: 1. For example, the person skilled in the art merely needs to perform a sequence alignment of the wild-type Factor VIII amino acid sequence with SEQ ID NO: 1 using a suitable alignment algorithm such as that of Needleman and Wunsch described above, and determine which residue aligns with the amino acid of SEQ ID NO: 1.

[0310] Optionally, the one or more substitution mutations comprises substitution of an amino acid at an inter-domain interface with an aromatic amino acid. Optionally, the one or more substitution mutations comprises substitution of an amino acid at an inter-domain interface with phenylalanine, tyrosine, histidine or tryptophan. Optionally, the one or more substitution mutations comprises substitution of a methionine residue at an inter-domain interface with phenylalanine, tyrosine or tryptophan. Optionally, the one or more substitution mutations comprises substitution of a histidine residue at an inter-domain interface with phenylalanine, tyrosine or tryptophan. Optionally, the one or more substitution mutations comprises the M662F, M662W or M662Y substitution. Optionally, the one or more substitution mutations comprises the H693F, H693W or H693Y substitution. Optionally, the one or more substitution mutations comprises the M662W substitution. Optionally, the one or more substitution mutations comprises the H693W or H693Y substitution. Optionally, the one or more substitution mutations comprises the H693W substitution. Optionally, the one or more substitution mutations comprises M662W and H693W substitutions.

[0311] Thus, in a particular embodiment, the Factor VIII polypeptide comprises a Factor VIII amino acid sequence which comprises one or more substitution mutations, wherein the one or more substitution mutations comprises the M662W substitution. In a further embodiment, the Factor VIII polypeptide comprises a Factor VIII amino acid sequence which comprises one or more substitution mutations, wherein the one or more substitution mutations comprises the H693W substitution. In yet a further embodiment, the Factor VIII polypeptide comprises a Factor VIII amino acid sequence which comprises one or more substitution mutations, wherein the one or more substitution mutations comprise the M662W and H693W substitutions.

[0312] Optionally, the Factor VIII polypeptide may comprise a Factor VIII amino acid sequence as set forth in any one of SEQ ID NOs: 77, 78, 79, 80, 84 or 85, or an amino acid sequence which is at least 90% at least 95%, at least 96%, at least 97%, at least 98% or at least 99% identical to an amino acid sequence set forth in any one of SEQ ID NOs: 77, 78, 79, 80, 84 or 85.

[0313] Optionally, the one or more substitution mutations does not comprise substitution of M662 with a less hydrophobic amino acid. Optionally, the one or more substitution mutations does not comprise M662I. Optionally, the one or more substitution mutations does not comprise M662C.

[0314] Optionally, the one or more substitution mutations does not comprise M662K. Optionally, the one or more substitution mutations does not comprise M662K if the Factor VIII amino acid sequence comprises an aspartic acid residue at the position corresponding to position 1828 of SEQ ID NO:1 (D1828). Optionally, the one or more substitution mutations does not comprise M662K if the Factor VIII amino acid sequence comprises the sequence MAPTKDEFDCKA at the positions corresponding to positions 1823-1834 of SEQ ID NO:1.

[0315] Optionally, the one or more substitution mutations does not comprise substitution of A108. Optionally, the one or more substitution mutations does not comprise substitution of A108 with a more hydrophobic amino acid. Optionally, the one or more substitutions does not comprise A1081.

[0316] Optionally, the one or more substitution mutations does not comprise substitution of a negatively-charged amino acid. Optionally, the one or more substitution mutations does not comprise substitution of a negatively-charged amino acid with an uncharged amino acid. Optionally, the one or more substitution mutations does not comprise substitution of D27, E272, E287, D302, D519, E540, E665, D666, E683, D696, D1795, E1829, E1984. Optionally, the one or more substitution mutations does not comprise substitution of D27, E272, E287, D302, D519, E540, E665, D666, E683, D696, D1795, E1829, E1984 with an uncharged amino acid. Optionally, the one or more substitution mutations does not comprise substitution of D27, E272, E287, D302, D519, E540, E665, D666, E683, D696, D1795, E1829, E1984 with alanine or valine. Optionally, the one or more substitution mutations does not comprise D519L, D519Q, D519T or D519V. Optionally, the one or more substitution mutations does not comprise substitution of two or more of D519, E665 and E1984. Optionally, the one or more substitution mutations does not comprise substitution of two or more of D519, E665 and E1984 with alanine or valine.

[0317] Optionally, the one or more substitution mutations does not comprise substitution of a positively-charged amino acid. Optionally, the one or more substitution mutations does not comprise substitution of a positively-charged amino acid with an uncharged amino acid. Optionally, the one or more substitution mutations does not comprise substitution of K380, R490, K512, K523, R527, K556, R562, K570 or R571. Optionally, the one or more substitution mutations does not comprise substitution of K380, R490, K512, K523, R527, K556, R562, K570 or R571 with an uncharged amino acid.

[0318] Optionally, the one or more substitution mutations does not comprise substitution of S313,

[0319] H317, T522, S524, R531, N538, S650, S654, N684, S695, S1791, Q1820, S1949, N1950 or R1966. Optionally, the one or more substitution mutations does not comprise substitution of S313, H317, T522, S524, R531, N538, S650, S654, N684, S695, S1791, Q1820, S1949, N1950 or R1966 with alanine. Optionally, the one or more substitution mutations does not comprise substitution of Y476, Y664, Y1786 or Y1792. Optionally, the one or more substitution mutations does not comprise substitution of Y476, Y664, Y1786 or Y1792 with phenylalanine.

[0320] Optionally, the one or more substitution mutations does not comprise substitution of K659. Optionally, the one or more substitution mutations does not comprise a non-conservative substitution of K659. Optionally, the one or more substitution mutations does not comprise K659D, K659E, K659Y, K659N, K659Q, K659T, K659S, K659C, K659W, K659F, K659P, K659M, K659V, K659L, K6591, K659Y, K659G or K659A. Optionally, the one or more substitution mutations does not comprise substitution of E665. Optionally, the one or more substitution mutations does not comprise a non-conservative substitution of E665. Optionally, the one or more substitution mutations does not comprise E665V, E6651, E665M, E665N or E665Y.

[0321] Optionally, the one or more substitution mutations comprises substitution of K659. Optionally, the one or more substitution mutations comprises K659Q, K659G, K6591 or K659F. Optionally, the one or more substitution mutations comprises substitution of E665. Optionally, the one or more substitution mutations comprises E665R, E665Q, E665H, E665K, E665M, E665F, E665W or E665Y.

[0322] In certain embodiments, the Factor VIII polypeptide may comprise a Factor VIII amino acid sequence which comprises one or more substitution mutations at an inter-domain interface selected from the A1/A3 domain interface, the A2/A3 domain interface or the A1/C2 domain interface, wherein at least one of the one or more substitution mutations comprises substitution of a pair of amino acids in the respective domains with cysteine residues. Put another way, the at least one or more substitution mutations may comprise substitution of a cysteine residue in a first domain (e.g. the A1 or A2 domain), and substitution of a cysteine residue in a second domain (e.g. the A3 or C2 domain). The pair of amino acids may therefore comprise a first amino (in a first domain) and a second amino acid (in a second domain). Put another way, the at least one or more substitution mutations may comprise substitution of a first amino acid (in a first domain), and a second amino acid (in a second domain) with cysteine residues. Thus, the Factor VIII polypeptide may comprise a Factor VIII amino acid sequence which comprises one or more substitution mutations which comprise substitution of a pair of cognate amino acids in two respective domains of the Factor VIII polypeptide with cysteine residues.

[0323] Optionally, the substitution of a pair of amino acids in the respective domains with cysteine residues allows the cysteine residues to form a disulphide bond between the respective domains. The formation of a disulphide bond may be determined by mass spectroscopy, and in particular by the analysing the fragmentation pattern of a polypeptide suspected of containing a disulphide bond, optionally following limited proteolysis, for example as outlined in Gorman et al. 2002. Mass Spectrometry Reviews 21, 183-216. Alternatively, the formation of a disulphide bond may be determined by performing limited proteolysis on a polypeptide and analysing the resulting protein fragments by SDS-PAGE under both reducing and non-reducing conditions, optionally in combination with N-terminal sequencing.

[0324] Optionally, the pair of amino acids which are substituted with cysteine residues may be in the A1 and A3 domains. Optionally, the first amino acid may correspond to M147, S149 or S289 of SEQ ID NO:1 and the second amino acid may correspond to E1969, E1970 or N1977 of SEQ ID NO:1. Optionally, the one or more substitution mutations comprises a pair of substitution mutations selected from the list consisting of (i) S289C and N1977C, (ii) M147C and E1970C, and (iii) S149C and E1969C.

[0325] Optionally, the pair of amino acids which are substituted with cysteine residues may be in the A2 and A3 domains. Optionally, the first amino acid corresponds to T667, T669, N684, L687, 1689, S695 or F697 of SEQ ID NO: 1 and the second amino acid corresponds to S1791, G1799, A1800, R1803, E1844, S1949, G1981, V1982, or Y1979 of SEQ ID NO: 1. Optionally, the one or more substitution mutations comprises a pair of substitution mutations selected from the list consisting of (i) T669C and V1982C, (ii) L687C and A1800C, (iii) I689C and G1799C, (iv) F697C and S1949C, (v) T667C and G1981C, (vi) T669C and Y1979C, (vii) N684C and S1791C, (viii) L687C and R1803C, and (ix) S695C and E1844C.

[0326] Optionally, the pair of amino acids which are substituted with cysteine residues may be in the A1 and C2 domains. Optionally, the first amino acid corresponds to A108, T118 or V137 of SEQ ID NO: 1 and the second amino acid corresponds to N2172, Q2329 or Y2332 of SEQ ID NO: 1. Optionally, the one or more substitution mutations comprises a pair of substitution mutations selected from the list consisting of (i) A108C and Q2329C, (ii) T118C and N2172C, and (iii) V137C and Y2332C.

[0327] Optionally, the one or more substitution mutations does not comprise a substitution of any one of the amino acids corresponding to positions 656-667 of SEQ ID NO:1 (YTFKHKMVYEDT) with a cysteine residue. Optionally, the one or more substitution mutations does not comprise a substitution of any one of the amino acids corresponding to positions 1823-1834 of SEQ ID NO:1 (MAPTKDEFDCKA) with a cysteine residue. Optionally, the one or more substitution mutations does not comprise a first substitution mutation comprising a substitution of any one of the amino acids corresponding to positions 656-667 of SEQ ID NO:1 (YTFKHKMVYEDT) with a cysteine residue and a second substitution mutation comprising a substitution of any one of the amino acids corresponding to positions 1823-1834 of SEQ ID NO:1 (MAPTKDEFDCKA) with a cysteine residue.

[0328] Optionally, the one or more substitution mutations does not comprise a pair of substitution mutations selected from the list consisting of Y656C and A1834C, T657C and K1833C, K659C and D1831C, H660C and F1830C, K662C and E1829C, M662C and D1828C, V663C and K1827C, Y664C and T1826C, E665C and P1825C, D666C and A1824C, and T667C and M1823C. Optionally, the one or more substitution mutations does not comprise a pair of substitution mutations selected from the list consisting of M662C and D1828C, and Y664C and T1826C. Optionally, the one or more substitution mutations does not comprise R121C and L2302C substitutions. Optionally, the one or more substitution mutations does not comprise a pair of substitution mutations selected from the list consisting of M662C and D1828C, S268C and F673C, 1312C and P672C, S313C and A644C, M662C and K1827C, Y664C and T1826C, P264C and Q645C, R282C and T522C, S285C and F673C, H311C and F673C, S314C and A644C, S314C and Q645C, V663C and E1829C, N694C and P1980C, and S695C and E1844C.

[0329] In particular embodiments, the one or more substitutions may comprise a pair of substitution mutations selected from the list consisting of (i) L687C and A1800C; (ii) N684C and S1791C; and (iii) S695C and E1844C. Optionally, the Factor VIII polypeptide may comprise a Factor VIII amino acid sequence as set forth in any one of SEQ ID NOs: 81, 82, 83, 86, 87 or 88, or an amino acid sequence which is at least 90% at least 95%, at least 96%, at least 97%, at least 98% or at least 99% identical to an amino acid as sequence set forth in any one of SEQ ID NOs: 81, 82, 83, 86, 87 or 88.

[0330] As outlined above, activation of Factor VIII requires proteolytic cleavage by thrombin. Following thrombin cleavage, Factor VIII forms a heterotrimeric complex consisting of the A1 domain, A2 domain, and A3-C1-C2 domains. In the course of activation, Factor VIII undergoes a conformational change. More specifically, in the course of activation, the orientation of the A2 domain relative to the A1 and A3-C1-C2 domains is altered. The A2 domain of activated Factor VIII thus is in a different orientation with respect to the A1, A3, C1 and C2 domains, to inactive Factor VIII. The A2 domain may therefore be seen to pivot with respect to the other domains of Factor VIII during the course of activation. The maximum activity of wild-type Factor VIII is typically seen approximately two minutes following activation.

[0331] Without wishing to be bound by theory, it is believed that the conformation change undertaken by the A2 domain may be required for Factor VIII activation. A substitution mutation which stabilises the conformation A2 domain in the orientation of the inactive Factor VIII may therefore inhibit activation of the Factor VIII polypeptide. In certain embodiments, the one or more substitution mutations do not inhibit activation of the Factor VIII polypeptide. Optionally, the one or more substitution mutations do not inhibit activation of the Factor VIII polypeptide relative to the activation of a reference wild-type Factor VIII polypeptide. Optionally, a Factor VIII polypeptide comprising a Factor VIII amino acid sequence which comprises one or more substitution mutations at the A1/A3, A2/A3 or A1/C2 domain interface is not activated more slowly than a reference wild-type Factor VIII polypeptide.

[0332] Inhibition of Factor VIII activation may be determined by comparing the time taken to achieve maximum Factor VIII activity following activation with that of a reference wild-type Factor VIII polypeptide. Thrombin may be added to a sample containing a Factor VIII polypeptide and Factor VIII activation may be monitored by taking aliquots of the sample at suitable time points and determining FVIII activity for each aliquot. Optionally FVIII activity may be measured over the course of five, ten, fifteen or twenty minutes following activation. Activity may be determined at a series of time points, e.g. two or more, three or more, four or more, five or more or six or more time points following activation. Optionally Factor VIII activity may be determined immediately prior to activation. By way of representative example, Factor VIII activity may be determined immediately following activation, and further measurements may be taken every thirty seconds following activation. Optionally, relative Factor VIII activity may be determined by calculating the fold-increase in Factor VIII activity at a given time point, compared to Factor VIII activity immediately following activation. Optionally, specific activity may be determined at each time point.

[0333] Optionally, the Factor VIII polypeptide may comprise a Factor VIII amino acid sequence which comprises an amino acid sequence that is at least 90%, at least 95%, at least 96%, at least 97%, at least 98%, at least 99% or 100% identical to the amino acid sequence set forth in SEQ ID NO: 77 or 78. Optionally, the Factor VIII polypeptide may comprise a Factor VIII amino acid sequence which consists of an amino acid sequence that is at least 90%, at least 95%, at least 96%, at least 97%, at least 98%, at least 99% or 100% identical to the amino acid sequence set forth in SEQ ID NO: 77 or 78. Optionally, the Factor VIII polypeptide may comprise a Factor VIII amino acid sequence which comprises the amino acid sequence set forth in SEQ ID NO: 77 or 78. Optionally, the Factor VIII polypeptide may comprise a Factor VIII amino acid sequence which consists of the amino acid sequence set forth in SEQ ID NO: 77 or 78.

[0334] Optionally, the Factor VIII nucleotide sequence encoding the Factor VIII amino acid sequence may be at least 85%, at least 90%, at least 95%, at least 96%, at least 97%, at least 98%, at least 99% or 100% identical to a nucleotide sequence comprising at least 4047, at least 4071, at least 4104, at least 4128, at least 4131, at least 4155, at least 4158, at least 4173, at least 4182, at least 4254 or at least 4263 nucleotides (optionally at least 4047, at least 4071, at least 4104, at least 4128, at least 4131, at least 4155, at least 4158, at least 4173, at least 4182, at least 4254 or at least 4263 contiguous nucleotides, or at least 4047, at least 4071, at least 4104, at least 4128, at least 4131, at least 4155, at least 4158, at least 4173, at least 4182, at least 4254 or at least 4263 nucleotides from up to 5, up to 4, up to 3 or up to 2 regions of SEQ ID NO:3, 4, 5 or 6) of SEQ ID NO:3, 4, 5 or 6. Optionally, the Factor VIII nucleotide sequence may comprise a nucleotide sequence that differs from the nucleotide sequence comprising at least 4047, at least 4071, at least 4104, at least 4128, at least 4131, at least 4155, at least 4158, at least 4173, at least 4182, at least 4254 or at least 4263 nucleotides of SEQ ID NO:3, 4, 5 or 6 by 40 or fewer, 35 or fewer, 30 or fewer, 25 or fewer, 20 or fewer, 15 or fewer, 14 or fewer, 13 or fewer, 12 or fewer, 11 or fewer, 10 or fewer, 9 or fewer, 8 or fewer, 7 or fewer, 6 or fewer, 5 or fewer, 4 or fewer, 3 or fewer, 2 or fewer, or 1 nucleotides. Optionally, the Factor VIII nucleotide sequence may comprise a nucleotide sequence that differs from the nucleotide sequence comprising at least 4047, at least 4071, at least 4104, at least 4128, at least 4131, at least 4155, at least 4158, at least 4173, at least 4182, at least 4254 or at least 4263 nucleotides of SEQ ID NO:3, 4, 5 or 6 only by alternative codons encoding the one or more substitution mutations.

[0335] Optionally, the Factor VIII nucleotide sequence encoding the Factor VIII amino acid sequence may be at least 85%, at least 90%, at least 95%, at least 96%, at least 97%, at least 98%, or at least 99% identical to the nucleotide sequence set forth in SEQ ID NO:39, 40, 41 or 42. Optionally, the Factor VIII nucleotide sequence may comprise a nucleotide sequence that differs from the nucleotide set forth in SEQ ID NO:39, 40, 41 or 42 by 43 or fewer, 40 or fewer, 35 or fewer, 30 or fewer, 25 or fewer, 20 or fewer, 15 or fewer, 14 or fewer, 13 or fewer, 12 or fewer, 11 or fewer, 10 or fewer, 9 or fewer, 8 or fewer, 7 or fewer, 6 or fewer, 5 or fewer, 4 or fewer, 3 or fewer, 2 or fewer, or 1 nucleotides. Optionally, the Factor VIII nucleotide sequence may comprise a nucleotide sequence that differs from the nucleotide sequence set forth in SEQ ID NO:39, 40, 41 or 42 only by alternative codons encoding the one or more substitution mutations.

[0336] Optionally, the Factor VIII nucleotide sequence encoding the Factor VIII amino acid sequence may comprise a nucleotide sequence that is at least 85%, at least 90%, at least 95%, at least 96%, at least 97%, at least 98%, at least 99% or 100% identical to the nucleotide set forth in SEQ ID NO:75. Optionally, the Factor VIII nucleotide sequence may consist of a nucleotide sequence that is at least 85%, at least 90%, at least 95%, at least 96%, at least 97%, at least 98%, at least 99% or 100% identical to the nucleotide sequence set forth in SEQ ID NO:75. Optionally, the Factor VIII nucleotide sequence may comprise the nucleotide sequence set forth in SEQ ID NO:75. Optionally, the Factor VIII nucleotide sequence may consist of the nucleotide sequence set forth in SEQ ID NO:75.

[0337] Optionally, the Factor VIII nucleotide sequence encoding the Factor VIII amino acid sequence may comprise a nucleotide sequence that is at least 85%, at least 90%, at least 95%, at least 96%, at least 97%, at least 98%, at least 99% or 100% identical to the nucleotide set forth in SEQ ID NO:76. Optionally, the Factor VIII nucleotide sequence encoding the Factor VIII amino acid sequence may comprise a nucleotide sequence that is at least 85%, at least 90%, at least 95%, at least 96%, at least 97%, at least 98%, at least 99% or 100% identical to a nucleotide sequence comprising at least 4047 nucleotides of SEQ ID NO: 76.

[0338] Optionally, the Factor VIII nucleotide sequence may consist of a nucleotide sequence that is at least 85%, at least 90%, at least 95%, at least 96%, at least 97%, at least 98%, at least 99% or 100% identical to the nucleotide sequence set forth in SEQ ID NO:76. Optionally, the Factor VIII nucleotide sequence may comprise the nucleotide sequence set forth in SEQ ID NO:76. Optionally, the Factor VIII nucleotide sequence may consist of the nucleotide sequence set forth in SEQ ID NO:76.

[0339] A recombinant AAV construct comprising a polynucleotide

[0340] The invention provides a recombinant AAV construct which comprises a polynucleotide comprising a Factor VIII nucleotide sequence, wherein the Factor VIII nucleotide sequence encodes a Factor VIII polypeptide comprising a Factor VIII amino acid sequence. The polynucleotide may be any polynucleotide of the invention. The Factor VIII nucleotide sequence may be any Factor VIII nucleotide sequence of the invention. The Factor VIII polypeptide may be any Factor VIII polypeptide of the invention.

[0341] The recombinant AAV construct is preferably less than 4900 nucleotides in length. The recombinant AAV construct may be between 4700 and 4900, between 4800 and 4900, between 4850 and 4900, between 4825 and 4875 or around 4845 nucleotides in length. The recombinant AAV construct may be around 4845 nucleotides in length. Optionally the recombinant AAV construct may comprise a polynucleotide comprising a Factor VIII nucleotide sequence of less than 4318 nucleotides in length. Optionally, the Factor VIII nucleotide sequence may be between 4318 and 4046, between 4318 and 4070, between 4264 and 4127, between 4210 and 4151 or around 4182 nucleotides in length. Optionally, the Factor VIII nucleotide sequence may be between 4318 and 4151, between 4318 and 4210, between 4318 and 4208, between 4318 and 4281, between 4318 and 4280, or around 4314 nucleotides in length. Optionally, the Factor VIII nucleotide sequence may be between 4318 and 4151, between 4318 and 4210, between 4318 and 4281, or around 4314 nucleotides in length. Optionally, the Factor VIII nucleotide sequence may be around 4314 nucleotides in length. Optionally, the Factor VIII nucleotide sequence may be around 4182 nucleotides in length.

[0342] The recombinant AAV construct may be between 4700 and 4900, between 4850 and 4900, or around 4883 nucleotides in length. The recombinant AAV construct may be less than 4850, less than 4800, or less than 4750 nucleotides in length. The recombinant AAV construct may be between 4700 and 4900, between 4700 and 4850, between 4700 and 4800, between 4700 and 4750 or around 4712 nucleotides in length.

[0343] The recombinant AAV construct may be less than 4850, less than 4800, or less than 4750 nucleotides in length. The recombinant AAV construct may be between 4700 and 4900, between 4700 and 4850, between 4700 and 4800, between 4700 and 4750 or around 4713 nucleotides in length. The recombinant AAV construct may be around 4713 nucleotides in length. Optionally, the recombinant AAV construct may comprise a polynucleotide comprising a Factor VIII nucleotide sequence of less than 4318 nucleotides in length. Optionally, the Factor VIII nucleotide sequence may be between 4318 and 4046, between 4264 and 4070, between 4264 and 4103, between 4255 and 4127, between 4246 and 4130, between 4237 and 4154, between 4228 and 4157, between 4219 and 4166, between 4210 and 4169, between 4201 and 4172, between 4192 and 4175 or around 4182 nucleotides in length.

[0344] Optionally, the recombinant AAV construct is between 4500 and 4900, between 4500 and 4850, between 4500 and 4750, around 4715 or around 4713 nucleotides in length. Optionally, the recombinant AAV construct is 4713 nucleotides in length.

[0345] The recombinant AAV construct may be between 4700 and 4850, between 4700 and 4800, between 4700 and 4750 or around 4713 nucleotides in length, and may optionally comprise a polynucleotide comprising a Factor VIII nucleotide sequence of less than 4318 nucleotides in length. Optionally, the Factor VIII nucleotide sequence may be between 4318 and 4046, between 4264 and 4070, between 4264 and 4103, between 4255 and 4127, between 4246 and 4130, between 4237 and 4154, between 4228 and 4157, between 4219 and 4166, between 4210 and 4169, between 4201 and 4172, between 4192 and 4175 or around 4182 nucleotides in length.

[0346] Optionally, the recombinant AAV construct may be around 4713 nucleotides in length and the Factor VIII nucleotide sequence may be between 4228 and 4157, between 4219 and 4166, between 4210 and 4169, between 4201 and 4172, between 4192 and 4175 or around 4131, around 4134, around 4155, around 4158, around 4161, around 4167, around 4173 or around 4182 nucleotides in length. Optionally, the recombinant AAV construct may be around 4713 nucleotides in length and the Factor VIII nucleotide sequence may be 4131, 4134, 4155, 4158 , 4161, 4167, 4173 or 4182 nucleotides in length. Optionally the recombinant AAV construct may be 4713 nucleotides in length and the Factor VIII nucleotide sequence may be SEQ ID NO:39.

[0347] In some cases, reference to the lengths of the Factor VIII nucleotide sequences in the above passages in the context of the recombinant AAV construct does not include a ‘stop’ codon —Factor VIII nucleotide sequences which include a stop codon would be three nucleotides longer than the nucleotide sequences recited above. In some embodiments, the Factor VIII nucleotide sequences may comprise a stop codon.

[0348] Optionally, the Factor VIII amino acid sequence does not comprise amino acids corresponding to positions 746 to 1639 of SEQ ID NO: 1. The Factor VIII amino acid sequence may comprise SEQ ID NO: 7. The Factor VIII amino acid sequence may be SEQ ID NO: 7. The Factor VIII amino acid sequence may comprise SEQ ID NO: 8. The Factor VIII amino acid sequence may be SEQ ID NO: 8.

[0349] The recombinant AAV construct may be single-stranded. The recombinant AAV construct may be an AAV genome.

[0350] The recombinant AAV construct may further comprise a transcriptional regulatory element (TRE). The transcriptional regulatory element may comprise a liver-specific promoter. The transcription regulatory element may be fewer than 270 nucleotides in length.

[0351] The transcription regulatory element of the invention may comprise, or may be, a promoter. The promoter may be a liver-specific promoter and/or may further comprise an enhancer. Optionally, the transcription regulatory element is liver-specific. In some embodiments, the transcription regulatory element or the promoter is liver-specific if it promotes protein expression at higher levels in liver cells compared to cells from at least one other organ or tissue.

[0352] Optionally, the transcription regulatory element or the promoter is liver-specific if it promotes protein expression at higher levels in liver cells compared to cells from at least one other organ or tissue and the transcription regulatory element or the promoter promotes protein expression in the cells from at least one other organ or tissue at a level less than 40%, less than 30%, less than 25%, less than 15%, less than 10%, or less than 5% of the level that the transcription regulatory element or the promoter promotes protein expression in liver cells.

[0353] Optionally, the cells from at least one other organ or tissue are at least one of kidney cells, pancreatic cells, breast cells, neuroblastoma cells, lung cells, and early B cells. Optionally, the cells from at least one other organ or tissue are kidney cells, pancreatic cells, breast cells, neuroblastoma cells, lung cells, and early B cells. Optionally, the cells from at least one other organ or tissue are at least one of HEK293T cells, PANC1 cells, BxPC-3 cells, MCF7 cells, 1643 cells, MRC-9 cells, and 697 cells. Optionally, the cells from at least one other organ or tissue are HEK293T cells, PANC1 cells, BxPC-3 cells, MCF7 cells, 1643 cells, MRC-9 cells, and 697 cells.

[0354] Optionally, whether or not the transcription regulatory element or the promoter is liver-specific may be determined by transducing Huh7 cells and comparator cells with a vector comprising the transcription regulatory element or promoter operably linked to a transgene and comparing the number of Huh7 cells that express the transgene with the number of comparator cells that express the transgene. The comparator cells can be non-liver cells. For example, if the user wishes to determine whether the transcription regulatory element or promoter promotes expression at higher levels in liver cells compared to breast cells, the user may transduce Huh7 cells and comparator cells that are breast cells such as MCF7 cells. If the number of Huh7 cells that express the transgene is significantly higher than the number of comparator cells that express the transgene then the promoter or transcription regulatory element is liver-specific.

[0355] The transgene may be GFP, in which case the user may determine the number of cells (e.g. the number of Huh7 cells or the number of comparator cells) that express the transgene using fluorescence microscopy and counting the number of cells that fluoresce green.

[0356] Optionally, the transcription regulatory element comprises a core nucleotide sequence which comprises or consists of a nucleotide sequence having at least 95% identity to SEQ ID NO: 43, or a sequence which differs from SEQ ID NO: 43 by a single nucleotide, and wherein the transcription regulatory element is between 80 and 280 nucleotides in length; optionally wherein the transcription regulatory element is between 80 and 225 nucleotides in length. Optionally, the transcription regulatory element comprises a core nucleotide sequence which comprises or consists of a sequence having at least 95% identity to SEQ ID NO: 43, or a sequence which differs from SEQ ID NO: 43 by a single nucleotide, wherein the transcription regulatory element:
[0357] (a) does not comprise at least 20, at least 30 or at least 40 consecutive nucleotides of SEQ ID NO: 48 and/or
[0358] (b) does not comprise at least 20, at least 30 or at least 40 consecutive nucleotides of SEQ ID NO: 49;
[0359] and wherein the transcription regulatory element is between 80 and 280 nucleotides in length. Such transcription regulatory elements are shortened versions of the known HLP2 transcription regulatory element (TRE).

[0360] The present inventors have surprisingly determined that a substantial number of nucleotides from the known HLP2 TRE can be deleted or modified without significantly impacting the efficacy of the TRE. In particular, the present inventors have surprisingly found that the short transcription regulatory element FRE 72 is of comparable efficacy (i.e. at least 50% or better activity by comparison) with the HLP2 TRE despite being of considerably shorter length. Indeed, the “core nucleotide sequence” (i.e. SEQ ID NO: 43 or a variant thereof) which is present in the HLP2 TRE can have some minimal efficacy as a TRE, but when it is lengthened to form the FRE 72 TRE (SEQ ID NO: 51) it provides even greater efficacy. As set out above, the present invention relates to recombinant AAV constructs that are shorter than 4900 nucleotides in length, and in that context short TREs are advantageous.

[0361] The present inventors have also discovered that the efficacy of the TREs can be increased by inclusion of additional nucleotide sequence(s), including nucleotide sequences 3′ to the core nucleotide sequence. Accordingly, the TRE may further comprise a nucleotide sequence located 3′ to the core nucleotide sequence.

[0362] Optionally, the transcription regulatory element further comprises a nucleotide sequence located 3′ to the core nucleotide sequence, and the nucleotide sequence located 3′ to the core nucleotide sequence comprises or consists of a nucleotide sequence:
[0363] a. of SEQ ID NO: 44, or a sequence which differs from SEQ ID NO: 44 by a single nucleotide;
[0364] b. of SEQ ID NO: 45, or a sequence which differs from SEQ ID NO: 45 by a single nucleotide;
[0365] c. of SEQ ID NO: 46, or a sequence which differs from SEQ ID NO: 46 by a single nucleotide; or
[0366] d. having at least 95% identity to SEQ ID NO: 47, or a sequence which differs from SEQ ID NO: 47 by a single nucleotide.

[0367] Optionally, the nucleotide sequence located 3′ to the core nucleotide sequence is shorter than 50 nucleotides; optionally is shorter than 40 nucleotides; and optionally is shorter than 30 nucleotides.

[0368] Optionally, the transcription regulatory element:
[0369] a. does not comprise a nucleotide sequence according to SEQ ID NO: 48, or does not comprise at least 20, at least 30 or at least 40 consecutive nucleotides of SEQ ID NO: 48; and/or
[0370] b. does not comprise a nucleotide sequence according to SEQ ID NO: 49 or does not comprise at least 20, at least 30 or at least 40 consecutive nucleotides of SEQ ID NO: 49.

[0371] Optionally, the transcription regulatory element:
[0372] a. does not comprise a sequence having at least 90% or at least 95% identity to SEQ ID NO: 48; and/or
[0373] b. does not comprise a sequence having at least 90% or at least 95% identity to SEQ ID NO: 49.

[0374] Optionally, the transcription regulatory element is shorter than 200 nucleotides, optionally shorter than 150 nucleotides, optionally shorter than 125 nucleotides. Optionally, the transcription regulatory element is at least 85 nucleotides in length, optionally at least 100 nucleotides in length, optionally at least 110 nucleotides in length.

[0375] Optionally, the transcription regulatory element terminates in a ten-nucleotide sequence selected from:
[0376] a. acagtgaatc (SEQ ID NO: 123); or
[0377] b. ctcctcagct (SEQ D NO: 124).

[0378] Optionally, the core nucleotide sequence is 73-80 nucleotides in length. Optionally, the core nucleotide sequence has at least 95% identity, and optionally at least 98% identity, to SEQ ID NO: 50. FRE72 comprises an extended core nucleotide sequence (corresponding to SEQ ID NO: 50 or a variant thereof). The extended core nucleotide sequence may be identical to SEQ ID NO: 50.

[0379] SEQ ID NO: 51 defines a transcription regulatory element of the invention (allocated the internal designation “FRE72”) having properties which are detailed in the examples below. It comprises the “extended core nucleotide sequence” of nucleotides 163-242 of HLP2, while the 5′ section lacks nucleotides 1-162 of HLP2 (and therefore completely lacks nucleotides 118-162 of HLP2). FRE72 can therefore be defined as not having a 5′ section (i.e. as not having a nucleotide sequence that is 5′ to the “extended core nucleotide sequence”). Alternatively, if FRE72 is instead considered to have the core nucleotide sequence of nucleotides 170-242 of HLP2, then it can be considered to have a 5′ section consisting of nucleotides 163-169 of HLP2. The 3′ section lacks nucleotides 243-296 of HLP2 (and therefore completely lacks nucleotides 243-283 of HLP2) and includes nucleotides 297-335 of HLP2. The overall length of FRE72 is 119 nucleotides.

[0380] FRE72 therefore provides a transcription regulatory element of the invention which (inter alia):
[0381] comprises the extended core nucleotide sequence as defined by SEQ ID NO: 50;
[0382] does not comprise a nucleotide sequence according to SEQ ID NO: 48;
[0383] does not comprise a nucleotide sequence according to SEQ ID NO: 49;
[0384] comprises a nucleotide sequence which is located 5′ to the core nucleotide sequence and which has less than 60% identity to SEQ ID NO: 48; and
[0385] comprises a nucleotide sequence located 3′ to the core nucleotide and which includes 3 TSS (transcriptional start site) defined by SEQ ID NOs: 44, 45 and 46.

[0386] Optionally, the transcription regulatory element comprises or consists of a sequence which has at least 90% identity, optionally at least 95% identity, or optionally at least 98% identity to SEQ ID NO: 51. Optionally, the transcription regulatory element comprises or consists of a sequence of SEQ ID NO: 51.

[0387] Optionally, the transcription regulatory element is operably linked to the Factor VIII nucleotide sequence.

[0388] Optionally, the transcription regulatory element may express a Factor VIII nucleotide sequence to which it is operably linked at 50% or better, 80% or better or 100% or better compared to the HLP2 TRE (defined by SEQ ID NO: 52).

[0389] The skilled person may compare the expression of a Factor VIII nucleotide sequence using a transcription regulatory element to the expression using the HLP2 TRE (SEQ ID NO: 52) by comparing the level of a Factor VIII polypeptide expressed under the control of a transcription regulatory element with the level of Factor VIII polypeptide expressed under the control of the HLP2 TRE in an in vitro or an in vivo system.

[0390] For example, to compare the level of Factor VIII polypeptide expressed in an in vitro system, the skilled person could transduce host cells with a vector comprising the TRE of interest operably linked to the Factor VIII nucleotide sequence (test cells), and some cells with a vector comprising HLP2 operably linked to the Factor VIII nucleotide sequence (reference cells). The cells may be cultured under conditions suitable for expressing the Factor VIII nucleotide sequence, and the level of Factor VIII polypeptide expressed in the test cells and reference cells can be compared. Suitable host cells include cultured human liver cells, such as Huh7 cells. The level of Factor VIII polypeptide should be normalised to reflect the number of cells that have been transfected using a luciferase assay. In the luciferase assays the test cells and the reference cells are also transfected using an equivalent vector (identical except for the promoter and the transgene) comprising a luciferase transgene, and the proportion of cells that are transfected by the vector will be proportionate to the fluorescent signal produced by the luciferase expressed from the vector comprising the luciferase transgene.

[0391] Similarly, to compare the level of Factor VIII nucleotide sequence expressed in an in vivo system, the skilled person could inject some mice (such as C57BL/6 mice) with a viral particle comprising the TRE of the invention operably linked to the Factor VIII nucleotide sequence (test mice), and some equivalent mice with a viral particle comprising HLP2 operably linked to the Factor VIII nucleotide sequence (reference mice). The mice may be culled and the level of Factor VIII polypeptide in the blood of the test mice may be compared to the level of Factor VIII polypeptide in the blood of the reference mice. The level of Factor VIII polypeptide may be normalised to the number of vector genomes per liver cell.

[0392] The level of Factor VIII polypeptide can be assessed using an ELISA. In an example of an ELISA assay, an antibody that binds to the Factor VIII polypeptide encoded by the transgene could be bound to a plate. The sample, comprising the Factor VIII polypeptide at unknown concentration, could be passed over the plate. A second detection antibody that binds to the polypeptide encoded by the transgene could be applied to the plate, and any excess washed off. The detection antibody that remains (i.e. is not washed off) will be bound to the polypeptide encoded by the transgene. The detection antibody could be linked to an enzyme such as horse radish peroxidase. The level of detection antibody that binds to the Factor VIII polypeptide on the plate could be measured by measuring the amount of the detection antibody. For example, if the detection antibody is linked to horse radish peroxidase, the horse radish peroxidase can catalyse the production of a blue reaction product from a substrate such as TMB (3,3′,5,5′-tetramethylbenzidine), and the level of the blue product can be detected by absorbance at 450 nm. The level of the blue product is proportional to the amount of detection antibody that remained after the washing step, which is proportional to the amount of the polypeptide encoded by the transgene in the sample. Alternatively, for example when using purified protein, the level of Factor VIII polypeptide may be determined spectrophotometrically.

[0393] For example, a suitable ELISA assay kit is the Asserachrom assay as described in the Examples. The level of the Factor VIII polypeptide may be measured using the Asserachrom assay.

[0394] Alternatively, the skilled person may assess the level of Factor VIII polypeptide by determining the activity of the Factor VIII polypeptide.

[0395] For example, the level of Factor VIII polypeptide may be determined using a chromogenic assay, such as a chromogenic assay that measures cofactor activity. For example, a suitable chromogenic assay is as follows. The Factor VIII polypeptide is mixed with human Factor X polypeptide and Factor IXa polypeptide, thrombin, phospholipids and calcium. The thrombin activates the Factor VIII polypeptide (having Factor VIII activity such as a Factor VIII polypeptide) to form Factor VIIIa polypeptide. The thrombin-activated polypeptide forms an enzymatic complex with Factor IXa polypeptide, phospholipids and calcium, which enzymatic complex can catalyse the conversion of Factor X polypeptide to Factor Xa polypeptide. The activity of the Factor Xa polypeptide can catalyse cleavage of a chromogenic substrate (e.g. SXa-11) to produce pNA. The level of pNA generated can be measured by determining colour development at 405 nm (e.g. measured by absorbance). Factor X polypeptide, and therefore Factor Xa polypeptide, is provided in excess. Therefore the limiting factor is Factor VIIIa polypeptide. Thus, the level of pNA generated is proportional to the amount of the Factor Xa polypeptide generated by the Factor VIII polypeptide in the sample, which is proportional to the activity of Factor VIII polypeptide in the sample. The activity of Factor VIII polypeptide in the sample is a measure of the cofactor activity of Factor VIII polypeptide in the sample.

[0396] For example, a suitable chromogenic assay is the BIOPHEN FVIII:C assay (Ref: 221406) manufactured by HYPHEN BioMed as used in the Examples. The activity of Factor VIII polypeptide may be measured using the BIOPHEN FVIII:C assay.

[0397] The recombinant AAV construct may further comprise a nucleotide sequence encoding a signal peptide. The signal peptide may be a wild-type Factor VIII signal peptide. The signal peptide may comprise the wild type FVIII signal peptide set forth in SEQ ID NO:53. Optionally, the signal peptide is not a wild-type Factor VIII signal peptide.

[0398] Optionally, the Factor VIII polypeptide encoded by the Factor VIII nucleotide sequence is expressed in plasma at a higher level following administration of the recombinant AAV construct compared to the administration of an equivalent dose of an equivalent recombinant AAV construct which comprises a wild-type Factor VIII signal peptide. The “equivalent recombinant AAV construct which comprises a wild-type Factor VIII signal peptide” is the same as the recombinant AAV construct of the invention except that the signal peptide is a wild-type Factor VIII signal peptide. Expression in plasma can be determined by the Asserachrom assay as described in the Examples.

[0399] Optionally, the Factor VIII polypeptide thereof encoded by the Factor VIII nucleotide sequence is expressed in plasma at least 1.1 fold, at least 1.2 fold, at least 1.5 fold, at least 1.8 fold, at least 2 fold, at least 5 fold higher compared to the equivalent recombinant AAV construct which comprises a wild-type Factor VIII signal peptide.

[0400] The signal peptide may comprise a sequence that is at least 90%, at least 92%, at least 95%, at least 98%, at least 99% or 100% identical to the sequence of any one of SEQ ID NOs: 56, 58 or 60. The signal peptide may comprise a sequence that is at least 90%, at least 92%, at least 95%, at least 98%, at least 99% or 100% identical to SEQ ID NO: 60. The signal peptide may comprise a sequence that is at least 90%, at least 92%, at least 95%, at least 98%, at least 99% or 100% identical to SEQ ID NO: 58. The signal peptide may comprise a sequence that is at least 90%, at least 92%, at least 95%, at least 98%, at least 99% or 100% identical to SEQ ID NO: 56. The signal peptide may comprise SEQ ID NO: 60. The signal peptide may comprise SEQ ID NO: 58. Preferably, the signal peptide may comprise SEQ ID NO: 56.

[0401] Preferably, the nucleotide sequence encoding the signal peptide is fewer than 57 nucleotides in length. More preferably, the nucleotide sequence encoding the signal peptide is around 54 nucleotides in length. The nucleotide sequence encoding the signal peptide may be around 54 nucleotides in length and encode the sequence of SEQ ID NO: 56. The nucleotide sequence encoding the signal peptide may be around 54 nucleotides in length and encode the sequence of SEQ ID NO:58. Optionally, the nucleotide sequence encoding the signal peptide may be codon optimised. Optionally, the nucleotide sequence encoding the signal peptide is not codon optimised. The nucleotide sequence encoding the signal peptide set forth in SEQ ID NO:56 may have the sequence of SEQ ID NO:57. The nucleotide sequence encoding the signal peptide set forth in SEQ ID NO:58 may have the sequence of SEQ ID NO:59.

[0402] The recombinant AAV construct may further comprise a polyA nucleotide sequence. The polyA nucleotide sequence may comprises the nucleotide sequence of any one of SEQ ID NOs: 63 to 66. The polyA nucleotide sequence may be synthetic. The polyA nucleotide sequence may be fewer than 50 nucleotides in length. The polyA nucleotide sequence may be between 16 and 50 nucleotides in length. The polyA nucleotide sequence may be around 49 nucleotides in length. The polyA nucleotide sequence may comprise the nucleotide sequence of SEQ ID NO: 65.

[0403] The recombinant AAV construct may further comprise one or two ITR(s). The or each ITR may be a wild-type ITR. The or each ITR may be an AAV2 ITR. The nucleotide sequence of the or each ITR may be fewer than 157, or fewer than 154 nucleotides in length. The nucleotide sequence of the or each ITR may be around 145 nucleotides in length. The nucleotide sequence of a 5′ ITR may comprise the nucleotide sequence of SEQ ID NO: 67. The nucleotide sequence of a 3′ ITR may comprise the nucleotide sequence of SEQ ID NO:70. The nucleotide sequence of a 5′ ITR may comprise the nucleotide sequence of SEQ ID NO: 67 and the nucleotide sequence of a 3′ ITR may comprise the nucleotide sequence of SEQ ID NO:70.

[0404] The Factor VIII nucleotide sequence encoding the Factor VIII amino acid sequence may comprise the sequence of SEQ ID NO: 39 or 75. The nucleotide sequence encoding the signal peptide may comprise SEQ ID NO: 57. The Factor VIII nucleotide sequence encoding the Factor VIII amino acid sequence may comprise the sequence of SEQ ID NO: 39 or 75 and the nucleotide sequence encoding the signal peptide may comprise SEQ ID NO: 57.

[0405] The recombinant AAV construct may comprise a transcriptional regulatory element which is a liver-specific promoter, and the liver-specific promoter may comprise the nucleotide sequence of SEQ ID NO: 51. The recombinant AAV construct may comprise two ITRs and a polyA nucleotide sequence, wherein the nucleotide sequence of the 5′ ITR is SEQ ID NO: 67 and the sequence of the 3′ ITR is SEQ ID NO:70, and the polyA nucleotide sequence comprises the nucleotide sequence of SEQ ID NO: 65. The AAV construct may have the sequence SEQ ID NO:62 or 71.

[0406] The recombinant AAV construct may comprise or consist of SEQ ID NO: 71.

[0407] The activity of the polypeptide encoded by the Factor VIII nucleotide sequence achieved may be higher following administration of the recombinant AAV construct compared to the administration of an equivalent dose of an equivalent recombinant AAV construct which comprises the AAV construct of SEQ ID NO: 1 of WO 2017/053677 (SEQ ID NO: 72). The activity of the polypeptide encoded by the Factor VIII nucleotide sequence achieved may be at least 1.1 fold, at least 1.2 fold, at least 1.5 fold, at least 1.8 fold, at least 2 fold, or at least 5 fold higher compared to the equivalent recombinant AAV construct which comprises the AAV construct of SEQ ID NO: 1 of WO 2017/053677 (SEQ ID NO: 72). The activity of the polypeptide encoded by the Factor VIII nucleotide sequence achieved may be between 1.1 fold and 5 fold, or between 1.5 fold and 3 fold, higher compared to the equivalent recombinant AAV construct which comprises the AAV construct of SEQ ID NO: 1 of WO 2017/053677 (SEQ ID NO: 72).

[0408] When recombinant AAV constructs of the invention which are less than 4900 nucleotides in length are used to produce AAV viral particles, the vector genome yield may be increased when compared to the vector genome yield obtained when a comparator recombinant AAV construct which is more than 4900 nucleotides in length is used.

[0409] Optionally, the vector genome yield is at least 1.5, at least 2, at least 2.25, at least 2.5, at least 2.75, at least 3, at least 4, or at least 5 fold higher than the vector genome yield obtained when the comparator recombinant AAV construct (of more than 4900 nucleotides in length) is used. Optionally, the vector genome yield is between 1.25 and 3 fold higher, between 1.5 and 3 fold higher, or between 2 and 3 fold higher than the vector genome yield obtained when the comparator recombinant AAV construct (of more than 4900 nucleotides in length) is used.

[0410] When a recombinant AAV construct of the invention which is less than 4900 nucleotides in length is used to produce AAV viral particles, the vector genome to total particle ratio may be increased when compared to the vector genome to total particle ratio obtained when a comparator recombinant AAV construct which is more than 4900 nucleotides in length is used.

[0411] Optionally, the vector genome to total particle ratio is at least 1.25, at least 1.5, at least 1.75, at least 2, at least 2.25, at least 2.5, at least 2.75, at least 3, at least 3.25, at least 3.5, at least 4, or at least 5 fold higher than the vector genome to total particle ratio obtained when the comparator recombinant AAV construct (which is more than 4900 nucleotides in length) is used. Optionally, the vector genome to total particle ratio is between 1.25 and 4 fold higher, or between 1.5 and 3.5 fold higher than the vector genome to total particle ratio obtained when the comparator recombinant AAV construct (which is more than 4900 nucleotides in length) is used.

[0412] When a recombinant AAV construct of the invention which is less than 4900 nucleotides in length is used to produce AAV viral particles, the nucleic acid impurity level may be decreased when compared to the nucleic acid impurity level obtained when a comparator recombinant AAV construct which is more than 4900 nucleotides in length is used. Optionally, the nucleic acid impurity level may be a plasmid-derived impurity level. Optionally, the nucleic acid impurity is an AAV cap-derived nucleic acid.

[0413] Optionally, the nucleic acid impurity level is 85% or lower, 75% or lower, 60% or lower, 50% or lower, 40% or lower, 30% or lower, or 20% or lower than the nucleic acid impurity level obtained when the comparator recombinant AAV construct is used. Optionally, the nucleic acid impurity level is between 40% and 80%, or between 50% and 70%, or between 15% and 55% of the nucleic acid impurity level obtained when the comparator recombinant AAV construct is used.

[0414] Optionally, when the recombinant AAV construct of the invention of less than 4900 nucleotides in length and the comparator recombinant AAV construct are used to produce AAV viral particles, the same AAV production system is used in each case. Optionally said AAV production system is a mammalian production system. Optionally said AAV production system is a two-plasmid system consisting of a helper plasmid comprising sequences encoding AAV Rep functions and a vector plasmid comprising sequences encoding AAV Cap functions.

[0415] Optionally, when the AAV production system is a two-plasmid system, such as a two-plasmid system consisting of a helper plasmid comprising AAV Rep functions and a vector plasmid comprising AAV Cap functions, the molar ratio of helper plasmid to vector plasmid is between about 12:1 and 1:12, between about 1:10 and 10:1, between about 1:5 and 5:1, between about 1:3 and 4:3 or between about 1:2 and 1:3. Optionally the molar ratio of helper plasmid to vector plasmid is around 4:3 or 1:3.

[0416] Optionally, the comparator recombinant AAV construct is more than 4910, more than 4920, more than 4930, more than 4940, more than 4950, more than 4960, more than 4970, more than 4980, more than 4990 or more than 5000 nucleotides in length. Optionally, the comparator recombinant AAV construct comprises or consists of SEQ ID NO: 72.

[0417] Features relating to how the recombinant AAV construct of the invention may be used are discussed further in the sections entitled “Production of AAV viral particles, increasing vector genome yield, increasing vector genome to total particle ratio, and decreasing nucleic acid impurity levels”, “AAV production system, two-plasmid system, vector plasmid and helper plasmid”, and “Transfecting, culturing and harvesting”.

[0418] A viral particle comprising the construct

[0419] The invention also provides an AAV viral particle comprising the recombinant AAV construct of the invention.

[0420] The invention further provides a viral particle comprising a recombinant genome comprising polynucleotides of the invention. For the purposes of the present invention, the term “viral particle” refers to all or part of a virion. For example, the viral particle comprises a recombinant genome and may further comprise a capsid. The viral particle may be a gene therapy vector. Herein, the terms “viral particle” and “vector” are used interchangeably. For the purpose of the present application, a“gene therapy” vector is a viral particle that can be used in gene therapy, i.e. a viral particle that comprises all the required functional elements to express a transgene, such as a Factor IX nucleotide sequence, in a host cell after administration.

[0421] Suitable viral particles include a parvovirus, a retrovirus, a lentivirus or a herpes simplex virus. The parvovirus may be an adeno-associated virus (AAV). The viral particle is preferably a recombinant adeno-associated viral (AAV) vector or a lentiviral vector. More preferably, the viral particle is an AAV viral particle. The terms AAV and rAAV are used interchangeably herein.

[0422] The genomic organization of all known AAV serotypes is very similar. The genome of AAV is a linear, single-stranded DNA molecule that is less than about 5,000 nucleotides in length. Inverted terminal repeats (ITRs) flank the unique coding nucleotide sequences for the non-structural replication (Rep) proteins and the structural (VP) proteins. The VP proteins (VP1, -2 and -3) form the capsid. The terminal 145 nt are self-complementary and are organized so that an energetically stable intramolecular duplex forming a T-shaped hairpin may be formed. These hairpin structures function as an origin for viral DNA replication, serving as primers for the cellular DNA polymerase complex. Following wild type (wt) AAV infection in mammalian cells the Rep genes (i.e. encoding Rep78 and Rep52 proteins) are expressed from the P5 promoter and the P19 promoter, respectively, and both Rep proteins have a function in the replication of the viral genome. A splicing event in the Rep ORF results in the expression of actually four Rep proteins (i.e. Rep78, Rep68, Rep52 and Rep40). However, it has been shown that the unspliced mRNA, encoding Rep78 and Rep52 proteins, in mammalian cells are sufficient for AAV vector production. Also in insect cells the Rep78 and Rep52 proteins suffice for AAV vector production.

[0423] AAV sequences that may be used in the present invention for the production of AAV vectors can be derived from the genome of any AAV serotype. Generally, the AAV serotypes have genomic sequences of significant homology at the amino acid and the nucleic acid levels, provide an identical set of genetic functions, produce virions which are essentially physically and functionally equivalent, and replicate and assemble by practically identical mechanisms. For the genomic sequence of the various AAV serotypes and an overview of the genomic similarities see e.g. GenBank Accession number U89790; GenBank Accession number J01901; GenBank Accession number AF043303; GenBank Accession number AF085716; Chiorini et al, 1997; Srivastava et al, 1983; Chiorini et al, 1999; Rutledge et al, 1998; and Wu et al, 2000. AAV serotype 1, 2, 3, 3B, 4, 5, 6, 7, 8, 9, 10, 11 or 12 may be used in the present invention. The sequences from the AAV serotypes may be mutated or engineered when being used in the production of gene therapy vectors.

[0424] Optionally, an AAV vector comprises ITR sequences which are derived from AAV1, AAV2, AAV4 and/or AAV6. Preferably the ITR sequences are AAV2 ITR sequences. Herein, the term AAVx/y refers to a viral particle that comprises some components from AAVx (wherein x is a AAV serotype number) and some components from AAVy (wherein y is the number of the same or different serotype). For example, an AAV2/8 vector may comprise a portion of a viral genome, including the ITRs, from an AAV2 strain, and a capsid derived from an AAV8 strain.

[0425] In an embodiment, the viral particle is an AAV viral particle comprising a capsid. AAV capsids are generally formed from three proteins, VP1, VP2 and VP3. The amino acid sequence of VP1 comprises the sequence of VP2. The portion of VP1 which does not form part of VP2 is referred to as VP lunique or VP1U. The amino acid sequence of VP2 comprises the sequence of VP3. The portion of VP2 which does not form part of VP3 is referred to as VP2unique or VP2U. The viral particle may comprise a capsid. The capsid may be selected from the group consisting of:
[0426] (i) a capsid comprising a sequence which is at least 96%, at least 98%, at least 99%, at least 99.5%, at least 99.8% or 100% identical to SEQ ID NO: 68;
[0427] (ii) a capsid comprising a sequence which is at least 96%, at least 98%, at least 99%, at least 99.5%, at least 99.8%, or 100% identical to SEQ ID NO: 69;
[0428] (iii) a liver-tropic capsid; and
[0429] (iv) an AAV5 capsid.

[0430] The capsid may be selected from the group consisting of:
[0431] (i) a capsid comprising a sequence which is at least 96%, at least 98%, at least 99%, at least 99.5%, at least 99.8% or 100% identical to SEQ ID NO: 91;
[0432] (ii) a capsid comprising a sequence which is at least 96%, at least 98%, at least 99%, at least 99.5%, at least 99.8% or 100% identical to SEQ ID NO: 92; and
[0433] (iii) an AAV6 capsid.

[0434] A viral particle of the invention may be a “hybrid” particle in which the viral ITRs and viral capsid are from different parvoviruses, such as different AAV serotypes. Preferably, the viral ITRs and capsid are from different serotypes of AAV, in which case such viral particles are known as transcapsidated or pseudotyped. Likewise, the parvovirus may have a “chimeric” capsid (e.g., containing sequences from different parvoviruses, preferably different AAV serotypes) or a “targeted” capsid (e. g., a directed tropism).

[0435] The activity of the polypeptide encoded by the Factor VIII nucleotide sequence achieved may be higher following administration of the AAV viral particle compared to the administration of an equivalent dose of an equivalent AAV viral particle which comprises the AAV construct of SEQ ID NO: 1 of WO 2017/053677 (SEQ ID NO: 72). The activity of the polypeptide encoded by the Factor VIII nucleotide sequence achieved may be at least 1.1 fold, at least 1.2 fold, at least 1.5 fold, at least 1.8 fold, at least 2 fold, or at least 5 fold higher compared to the equivalent AAV viral particle which comprises the AAV construct of SEQ ID NO: 1 of WO 2017/053677 (SEQ ID NO: 72). The activity of the polypeptide encoded by the Factor VIII nucleotide sequence achieved may be between 1.1 fold and 5 fold, or between 1.5 fold and 3 fold, higher compared to the equivalent AAV viral particle which comprises the AAV construct of SEQ ID NO: 1 of WO 2017/053677 (SEQ ID NO: 72).

[0436] Production of AAV viral particles, increasing vector genome yield, increasing vector genome to total particle ratio, and decreasing nucleic acid impurity levels

[0437] The recombinant AAV construct of the invention may be used to produce a population of AAV viral particles. The present invention provides use of the recombinant AAV construct of the invention for producing a population of AAV viral particles. Optionally, the use comprises transfecting a host cell with the recombinant AAV construct of the invention and culturing the host cell under conditions suitable for AAV viral particle production.

[0438] The present invention also provides a method for producing a population of AAV viral particles comprising:
[0439] a) obtaining the recombinant AAV construct of the invention;
[0440] b) transfecting a host cell with the said recombinant AAV construct; and
[0441] c) culturing the host cell under conditions suitable for AAV viral particle production.

[0442] Preferably the recombinant AAV construct used to produce the population of AAV viral particles is less than 4900 nucleotides in length. In other words, preferably a recombinant AAV construct of the invention (e.g. as described above) which is less than 4900 nucleotides in length may be used to produce the population of AAV viral particles. For example, the recombinant AAV construct may be less than 4800 nucleotides in length.

[0443] When using the recombinant AAV construct of the invention which is less than 4900 nucleotides in length, optionally, the population of AAV viral particles:
[0444] a) has an increased vector genome yield when compared to the vector genome yield obtained when a comparator recombinant AAV construct is used;
[0445] b) has an increased vector genome to total particle ratio when compared to the vector genome to total particle ratio obtained when a comparator recombinant AAV construct is used; and/or
[0446] c) has a decreased nucleic acid impurity level when compared to the nucleic acid impurity level obtained when a comparator recombinant AAV construct is used;
   wherein the comparator recombinant AAV construct is more than 4900 nucleotides in length.

[0447] The present invention also provides use of the recombinant AAV construct of the invention which is less than 4900 nucleotides in length for:
[0448] a) increasing the vector genome yield during AAV viral particle production when compared to the vector genome yield obtained when a comparator recombinant AAV construct is used;
[0449] b) increasing the vector genome to total capsid ratio during AAV viral particle production when compared to the vector genome to total capsid ratio obtained when a comparator recombinant AAV construct is used; and/or
[0450] c) decreasing the nucleic acid impurity level during AAV viral particle production when compared to the nucleic acid impurity level obtained when a comparator recombinant AAV construct is used;
   wherein the comparator recombinant AAV construct is more than 4900 nucleotides in length.

[0451] In some embodiments, the use comprises transfecting a host cell with the recombinant AAV construct of the invention which is less than 4900 nucleotides in length and culturing the host cell under conditions suitable for AAV viral particle production.

[0452] The present invention also provides a method for increasing the vector genome yield during the production of a population of AAV viral particles, comprising:
[0453] a) obtaining the recombinant AAV construct of the invention which is less than 4900 nucleotides in length;
[0454] b) transfecting a host cell with the said recombinant AAV construct; and
[0455] c) culturing the host cell under conditions suitable for AAV viral particle production;
   wherein the vector genome yield is increased when compared to the vector genome yield obtained when a comparator recombinant AAV construct of more than 4900 nucleotides in length is used.

[0456] Optionally, vector genome yield is increased when a recombinant AAV construct of the invention which is less than 4900 nucleotides in length is used to produce AAV viral particles when compared to the vector genome yield obtained when a comparator recombinant AAV construct which is more than 4900 nucleotides in length is used.

[0457] In some embodiments, the term “yield” refers to the amount of AAV particles that are produced. In some embodiments, the “yield” may be expressed as the “vector genome yield”. The “vector genome yield” relates to the number of vector genomes that are produced. The “vector genome yield” may be expressed as the number of vector genomes (vg) per ml of medium (as measured on bulk product prior to harvesting, purifying and/or concentrating the population of AAV viral particles). The number of vector genomes may be determined using qPCR. Optionally, the vector genome yield is at least 1.5, at least 2, at least 2.25, at least 2.5, at least 2.75, at least 3, at least 4, or at least 5 fold higher than the vector genome yield obtained when the comparator recombinant AAV construct (of more than 4900 nucleotides in length) is used. Optionally, the vector genome yield is between 1.25 and 3 fold higher, between 1.5 and 3 fold higher, or between 2 and 3 fold higher than the vector genome yield obtained when the comparator recombinant AAV construct (of more than 4900 nucleotides in length) is used. Optionally, the vector genome yield is between 1.5 and 2 fold higher than the vector genome yield obtained when the comparator recombinant AAV construct (of more than 4900 nucleotides in length) is used.

[0458] The present invention also provides a method for increasing the vector genome to total particle ratio during the production of a population of AAV viral particles, comprising:
[0459] a) obtaining the recombinant AAV construct of the invention which is less than 4900 nucleotides in length;
[0460] b) transfecting a host cell with the said recombinant AAV construct; and
[0461] c) culturing the host cell under conditions suitable for AAV viral particle production;
   wherein the vector genome to total particle ratio is increased when compared to the vector genome to total particle ratio obtained when a comparator recombinant AAV construct of more than 4900 nucleotides in length is used.

[0462] Optionally, vector genome to total particle ratio is increased when a recombinant AAV construct of the invention which is less than 4900 nucleotides in length is used to produce AAV viral particles when compared to the vector genome to total particle ratio obtained when a comparator recombinant AAV construct which is more than 4900 nucleotides in length is used.

[0463] The vector genome to total particle ratio may be expressed herein as the percentage of the total number of particles (capsids) that notionally comprise a vector genome or at least a partial such genome (assuming one (partial) genome per capsid) as determined using qPCR. The vector genome to total particle ratio may be determined using qPCR to determine the number of vector genomes (as discussed above), and using a capsid-specific ELISA to measure the total number of particles. For example, the capsid-specific ELISA may comprise exposing the AAV particles to an antibody that binds to the capsid protein. If, for example, the capsid protein is from an AAV2 serotype, the antibody may be an antibody that binds to the AAV2 capsid. For example, the user may coat a plate with an antibody that is specific for the capsid. The user may then pass the AAV particles over the surface of the plate. The particles will bind to the antibody and be immobilised on the plate. The plate may then be washed to remove contaminants. The amount of particle present can then be detected by addition of a detection antibody that can bind to the capsid and is conjugated to a detection agent such as streptavidin peroxidase. The amount of particle present will be proportional to the colour change obtained when the streptavidin peroxidase is exposed to the chromogenic substrate TMB (tetramethylbenzidine).

[0464] Optionally, the vector genome to total particle ratio is at least 1.25, at least 1.5, at least 1.75, at least 2, at least 2.25, at least 2.5, at least 2.75, at least 3, at least 3.25, at least 3.5, at least 4, or at least 5 fold higher than the vector genome to total particle ratio obtained when the comparator recombinant AAV construct (which is more than 4900 nucleotides in length) is used. Optionally, the vector genome to total particle ratio is between 1.25 and 4 fold higher, or between 1.5 and 3.5 fold higher than the vector genome to total particle ratio obtained when the comparator recombinant AAV construct (which is more than 4900 nucleotides in length) is used. Optionally, the vector genome to total particle ratio is between 1.4 and 1.6 fold higher than the vector genome to total particle ratio obtained when the comparator recombinant AAV construct (which is more than 4900 nucleotides in length) is used.

[0465] When producing AAV particles which are, for example, suitable for use therapeutically, such as in gene therapy, there is a desire to reduce the amount of nucleic acid impurities present. The inventors have found that using a recombinant AAV construct of the invention which is less than 4900 nucleotides in length resulted in lower nucleic acid impurity levels than when using a comparator recombinant AAV construct which is longer than 4900 nucleotides in length.

[0466] The present invention also provides a method for decreasing the nucleic acid impurity level during the production of a population of AAV viral particles, comprising:
[0467] a) obtaining the recombinant AAV construct of the invention which is less than 4900 nucleotides in length;
[0468] b) transfecting a host cell with the said recombinant AAV construct; and
[0469] c) culturing the host cell under conditions suitable for AAV viral particle production;
   wherein the nucleic acid impurity level is decreased when compared to the nucleic acid impurity level obtained when a comparator recombinant AAV construct of more than 4900 nucleotides in length is used.

[0470] Optionally, nucleic acid impurity level is decreased when a recombinant AAV construct of the invention which is less than 4900 nucleotides in length is used to produce AAV viral particles when compared to the nucleic acid impurity level obtained when a comparator recombinant AAV construct which is more than 4900 nucleotides in length is used.

[0471] The term “nucleic acid impurity” refers to the nucleic acid, present in the population of AAV viral particles, which was not intended to be packaged. In general, the intention is to package the recombinant AAV construct of the invention as a vector genome (AAV genome). AAV viral particles can be generated using plasmids which provide the AAV Rep and Cap functions and provide the vector genome. The plasmids can also provide the adenoviral helper functions or the helper functions can be provided through co-infection with adenovirus. Such plasmids are discussed further in the section entitled: “AAV production system, two-plasmid system, vector plasmid and helper plasmid”. Generally, any sequence which is present in the population of AAV viral particles produced, and which is not present in the vector genome, is considered a nucleic acid impurity. For example, any plasmid-derived sequence which does not form part of the vector genome is considered a nucleic acid impurity, i.e. a “plasmid-derived nucleic acid impurity”. As an example, full or partial sequences encoding Cap and/or Rep proteins are considered plasmid-derived nucleic acid impurities. Optionally, the plasmid-derived nucleic acid impurity is an AAV cap-derived nucleic acid, i.e. a nucleic acid comprising part or all of a sequence encoding a Cap protein. As a further example, prokaryotic DNA sequences, such as antibiotic resistance genes or sequences derived from the plasmid backbone, are considered plasmid-derived nucleic acid impurities. As an example, nucleic acid sequences of the kanamycin resistance gene (kanR) are considered plasmid-derived nucleic acid impurities. The plasmid backbone is the bacterial sequence needed to amplify the plasmids in bacterial host cells. The plasmid backbone may be the region of the plasmid that is not derived from adenovirus or AAV or is not situated between two AAV-derived ITRs. On the other hand, any sequences which are present in the vector genome intended to be packaged, such as the Factor VIII nucleotide sequence, the nucleic acid sequence encoding the signal peptide, the sequence of the ITR(s), the sequence of the transcriptional regulatory element, the sequence encoding the signal peptide, and/or the polyA sequence, are not considered nucleic acid impurities. Nucleic acid impurities may also derive from the genome of the host cell from which the AAV can be produced , and are referred to as “host cell-derived nucleic acid impurity”. The term “nucleic acid impurity level” refers to the amount of nucleic acid impurity present in the population of AAV viral particles.

[0472] Optionally, the nucleic acid impurity level is 85% or lower, 75% or lower, 60% or lower, 50% or lower, 40% or lower, 30% or lower, 20% or lower, or 15% or lower than the nucleic acid impurity level obtained when the comparator recombinant AAV construct is used. Optionally, the nucleic acid impurity level is 85% or lower, 75% or lower, 60% or lower, 50% or lower, 40% or lower, 30% or lower, or 20% or lower than the nucleic acid impurity level obtained when the comparator recombinant AAV construct is used. Optionally, the nucleic acid impurity level is between 40% and 80%, between 50% and 70%, or between 15% and 55% of the nucleic acid impurity level obtained when the comparator recombinant AAV construct is used. Optionally, the nucleic acid impurity level is between 40% and 60%, or between 45% and 55% of the nucleic acid impurity level obtained when the comparator recombinant AAV construct is used. The nucleic acid impurity level being, e.g., “70% or lower”, corresponds to a fold change value of 0.7 or lower relative to the nucleic acid impurity level when a comparator recombinant AAV construct (which is more than 4900 nucleotides in length) is used. The fold change value is calculated by dividing the nucleic acid impurity level when the recombinant AAV construct (which is less than 4900 nucleotides in length) is used by the nucleic acid impurity level when a comparator recombinant AAV construct (which is more than 4900 nucleotides in length) is used.

[0473] The nucleic acid impurity level may be measured by qPCR. Suitable qPCR is discussed in Example 15. Optionally, the qPCR may use primers which bind to a sequence encoding cap. Optionally, the qPCR may use primers which bind to nucleic acid sequences of the kanamycin resistance gene (kanR). The AAV viral particles may be purified prior to the qPCR analysis. The purification may be by any of the methods of purification described herein, such as affinity chromatography.

[0474] The “comparator recombinant AAV construct” is more than 4900 nucleotides in length. The comparator recombinant AAV construct comprises a polynucleotide comprising a Factor VIII nucleotide sequence, wherein the Factor VIII nucleotide sequence encodes a Factor VIII polypeptide comprising a Factor VIII amino acid sequence. Optionally, the comparator recombinant AAV construct is more than 4910, more than 4920, more than 4930, more than 4940, more than 4950, more than 4960, more than 4970, more than 4980, more than 4990 or more than 5000 nucleotides in length. Optionally, the comparator recombinant AAV construct comprises SEQ ID NO: 72 (AAV construct of SEQ ID NO: 1 of WO 2017/053677). Optionally, the comparator recombinant AAV construct consists of SEQ ID NO: 72 (AAV construct of SEQ ID NO: 1 of WO 2017/053677).

[0475] When referring to percent changes in nucleic acid impurity level, fold changes in vector genome to total particle ratio, or fold changes in vector genome yield, the term “between” includes the specified values.

[0476] AAV production system, two plasmid system, vector plasmid and helper plasmid

[0477] When AAV viral particles are produced according to the invention, any AAV production system may be used. When the recombinant AAV construct of the invention and the comparator recombinant AAV construct are used to produce AAV viral particles, the same AAV production system may be used in each case. Optionally, the AAV production system is an insect cell or baculovirus production system. Optionally, the AAV production system is a mammalian production system. Optionally, a producer cell line is used in which the recombinant AAV construct and/or the AAV rep and/or cap genes are incorporated into the host cell genome, wherein infection of the producer cell with helper virus facilitates AAV production. Alternatively, optionally, plasmids are used to produce AAV viral particles. Optionally, the plasmids are circular nucleic acid molecules. Optionally, the plasmids are nucleic acid molecules that are of bacterial origin. Optionally, the AAV production system is a two-plasmid system. The phrase “two plasmid system” refers to a system that comprises two plasmids (which may be referred to as a vector plasmid and a helper plasmid), and can be used without the need for additional plasmids to produce AAV viral particles. Optionally, the two-plasmid system can be used to produce AAV viral particles without the need for genetic material originating from a host cell, optionally with the exception of a gene encoding E1A/B. However, the two-plasmid system may comprise additional non-plasmid components. Optionally, the two-plasmid system does not comprise a helper virus. Optionally, the two-plasmid system comprises all the necessary genetic information for the production of AAV viral particles. For example, the two-plasmid system may comprise at least one rep gene, at least one cap gene and at least one helper gene. Optionally, the two-plasmid system comprises all the necessary genetic information required for the production of AAV viral particles suitable for use in gene therapy. Optionally, the two-plasmid system may be the trans-split two plasmid system as described in WO 2020/208379.

[0478] Optionally, the two-plasmid system comprises a helper plasmid and a vector plasmid. Optionally, the two-plasmid system consists of a helper plasmid and a vector plasmid. The term “helper” is not intended to be limiting. Accordingly, a “helper plasmid” is any plasmid that is suitable for use alongside a vector plasmid in a two-plasmid system. Optionally, the helper plasmid comprises at least one rep gene. Optionally, the helper plasmid comprises sequences encoding AAV Rep functions. Optionally, the helper plasmid comprises at least one helper gene. The term “vector plasmid” is not intended to be limiting. Accordingly, a “vector plasmid” is any plasmid that is suitable for use alongside a helper plasmid in a two-plasmid system. Optionally, the vector plasmid comprises at least one cap gene. Optionally, the vector plasmid comprises sequences encoding AAV Cap functions. Optionally, the vector plasmid comprises the recombinant AAV construct of the invention (or the comparator recombinant AAV construct).

[0479] Optionally, the vector plasmid backbone encompasses any nucleotides except the at least one cap gene, a promoter (region) operably linked to the at least one cap gene and the recombinant AAV construct of the invention (or the comparator recombinant AAV construct). Optionally, the helper plasmid backbone encompasses any nucleotides except the at least one helper gene and associated adenovirus-derived regulatory elements, and the at least one rep gene and associated AAV-derived regulatory elements.

[0480] Optionally, the molar ratio of helper plasmid to vector plasmid is between about 12:1 and 1:12, between about 1:10 and 10:1, between about 1:5 and 5:1, or between about 1:3 and 4:3. Optionally, the molar ratio of helper plasmid to vector plasmid is between 1:2 and 1:4, or around 1:3. Optionally, the molar ratio of helper plasmid to vector plasmid is between about 1:3 and 4:3. Optionally, the molar ratio of helper plasmid to vector plasmid is around 4:3. When referring to the molar ratio, the term “between” includes the specified values.

[0481] Transfecting, culturing and harvesting

[0482] In some embodiments, the methods of the invention may comprise steps of obtaining the recombinant AAV construct of the invention, optionally which is less than 4900 nucleotides in length as outlined above, transfecting a host cell with the said recombinant AAV construct, and culturing the host cell under conditions suitable for AAV viral particle production. The uses of the invention may comprise transfecting a host cell with the recombinant AAV construct of the invention, optionally which is less than 4900 nucleotides in length as outlined above, and culturing the host cell under conditions suitable for AAV viral particle production.

[0483] Transfecting a host cell with the said recombinant AAV construct may comprise exposing the host cell to the said recombinant AAV construct in conditions suitable for transfection. For example, the user of the method or use may add a transfection agent (addition of a transfection agent would be considered to be a condition suitable for transfection). Alternatively, calcium phosphate transfection, electroporation or cationic liposomes could be used. Optionally, the step of transfecting the host cell takes place when the host cell has grown to confluence.

[0484] Culturing the host cell under conditions suitable for AAV viral particle production refers to culturing the host cell under conditions at which it can grow and AAV can replicate. For example, the host cell may be cultured at a temperature between 32° C. and 40° C., between 34° C. and 38° C., between 35° C. and 38° C. or around 37° C. When referring to temperature, the term “between” includes the specified values. Optionally, the host cell may be cultured in the presence of a complete cell culture medium such as Dulbecco's Modified Eagle's Medium (DM EM). A completed cell culture medium is a medium that provides all the essential nutrients required for growth of the host cell. Optionally, the complete cell culture medium is supplemented with serum, such as fetal bovine serum or bovine serum albumin.

[0485] In some embodiments, the host cell is selected from the group consisting of a HEK293T cell, a HEK293 cell, a HEK293EBNA cell, a CAP cell, a CAP-T cell, an AGE1.CR cell, a PerC6 cell, a C139 cell, and an EB66 cell. Optionally, the host cell is a cell that expresses a functional E1A/B protein.

[0486] In some embodiments, the methods further comprise a step of harvesting the AAV viral particles to provide a population of AAV viral particles.

[0487] In some embodiments, the methods or uses further comprise a step of purifying the AAV viral particles. In general, a step of purifying the AAV viral particles will involve increasing the concentration of the AAV viral particles compared to other components. Optionally, the step of purifying the AAV viral particles results in isolated AAV viral particles.

[0488] Any suitable purification method may be used. Optionally, the step of purifying the AAV viral particles is carried out using a technique selected from the group consisting of gradient density centrifugation (such as CsCl or Iodixanol gradient density centrifugation), filtration, ion exchange chromatography, size exclusion chromatography, affinity chromatography and hydrophobic interaction chromatography.

[0489] In some embodiments, the methods or uses comprise further concentrating the AAV viral particles using ultracentrifugation, tangential flow filtration, or gel filtration.

[0490] In some embodiments, the methods or uses further comprise formulating the AAV viral particles with a pharmaceutically acceptable excipient. The pharmaceutically acceptable excipients may comprise carriers, diluents and/or other medicinal agents, pharmaceutical agents or adjuvants, etc. Optionally, the pharmaceutically acceptable excipients comprise saline solution. Optionally, the pharmaceutically acceptable excipients comprise human serum albumin.

[0491] In some embodiments, the recombinant AAV construct used in the methods or uses of the invention may be present in a plasmid, such as a vector plasmid. Methods for producing AAV viral particles using a recombinant AAV construct of the invention, or uses of the recombinant AAV construct of the invention for producing AAV viral particles, thus encompass the use of a recombinant AAV construct of the invention when present in such a plasmid. For example a plasmid, such as a vector plasmid, may comprise the recombinant AAV construct. Thus a plasmid, such as a vector plasmid, comprising the recombinant AAV construct may be used in the uses and methods of the invention described above. The plasmid may be part of a two-plasmid system. For example, a two-plasmid system comprising a plasmid (such as a vector plasmid) which comprises the recombinant AAV construct may be used in the uses and methods of the invention described above.

[0492] For the purposes of comparing properties of a population of AAV viral particles (e.g. the vector genome yield, the vector genome to total particle ratio and/or the nucleic acid impurity level) when a recombinant AAV construct of the invention is used, with a population of AAV viral particles when a comparator recombinant AAV construct is used, it is preferred that the same AAV production system is used in each case. For example, when the recombinant AAV construct used in the methods or uses of the invention is present in a plasmid, such as a vector plasmid, the comparator recombinant AAV construct is also present in an equivalent plasmid, such as an equivalent vector plasmid. Similarly. when the recombinant AAV construct used in the methods or uses of the invention is present in a plasmid which is part of a two-plasmid system, the comparator recombinant AAV construct is also present in an equivalent plasmid as part of an equivalent two-plasmid system.

[0493] Population of AAV Viral Particles

[0494] The present invention also provides a population of AAV viral particles obtained by any one of the above methods of the invention. The present invention also provides a population of AAV viral particles obtainable by any one of the above methods of the invention.

[0495] The population of AAV viral particles may be used in the methods and uses described below. The composition of the invention as described below may comprise the population of AAV viral particles.

[0496] Compositions, Methods and Uses

[0497] In a further aspect of the invention, there is provided a composition comprising the polynucleotide or construct/viral particle of the invention and a pharmaceutically acceptable excipient.

[0498] The pharmaceutically acceptable excipients may comprise carriers, diluents and/or other medicinal agents, pharmaceutical agents or adjuvants, etc. Optionally, the pharmaceutically acceptable excipients comprise saline solution. Optionally, the pharmaceutically acceptable excipients comprise human serum albumin.

[0499] The invention further provides a polynucleotide, construct/viral particle or composition of the invention for use in a method of treatment. Optionally the method of treatment comprises administering an effective amount of the polynucleotide or construct/viral particle of the invention to a patient. Optionally the method of treatment comprises administering an effective amount of the composition of the invention to a patient.

[0500] The invention further provides use of the polynucleotide, construct/viral particle or composition of the invention in the manufacture of a medicament for use in a method of treatment. Optionally the method of treatment comprises administering an effective amount of the polynucleotide or construct/viral particle of the invention to a patient. Optionally the method of treatment comprises administering an effective amount of the composition of the invention to a patient.

[0501] Optionally the method of treatment is a gene therapy. A “gene therapy” involves administering a construct/viral particle of the invention that is capable of expressing a transgene (such as a Factor VIII nucleotide sequence) in the host to which it is administered.

[0502] Optionally, the method of treatment is a method of treating a coagulopathy such as haemophilia (for example haemophilia A or B) or Von Willebrands' disease. Preferably, the coagulopathy is characterised by increased bleeding and/or reduced clotting. Optionally, the method of treatment is a method of treating haemophilia, for example haemophilia A. In some embodiments, the patient is a patient suffering from haemophilia A. Optionally the patient has antibodies or inhibitors to Factor VIII. Optionally, the polynucleotide and/or construct/viral particle is administered intravenously. Optionally, the polynucleotide and/or construct/viral particle is for administration only once (i.e. a single dose) to a patient.

[0503] Optionally, the method of the invention may further comprise a step of determining whether the patient has been partially or fully treated (e.g. determining that the patient has been partially or fully treated for the symptoms of haemophilia A) by administration of the gene therapy vector. Partially or fully treating haemophilia A may refer to improving the clotting of a patient suffering from haemophilia A, and reducing the risk of an uncontrolled bleeding event. Partially or fully treating haemophilia A may refer to reducing the number and/or frequency of uncontrolled bleeding events or internal bleeding e.g. in joints. A patient who is partially or fully treated may suffer fewer uncontrolled bleeding events per year. When haemophilia A is “treated” in the above method, this means that one or more symptoms of haemophilia are ameliorated. It does not mean that the symptoms of haemophilia are completely remedied so that they are no longer present in the patient, although in some methods, this may be the case. The method of treatment may result in one or more of the symptoms of haemophilia A being less severe than before treatment. Partially or fully treating haemophilia A may refer to increasing the amount or activity of FVIII present in the plasma of the patient. Optionally, relative to the situation pre-administration, the method of treatment results in an increase in the amount/concentration of circulating Factor VIII in the blood of the patient, and/or the overall level of Factor VIII activity detectable within a given volume of blood of the patient, and/or the specific activity (activity per amount of Factor VIII protein) of the Factor VIII in the blood of the patient. Partially treating haemophilia may refer to converting a patient with severe (<1% normal blood clotting factor activity) or moderately severe haemophilia (<2% normal blood clotting factor activity) to a patient with mild haemophilia (5-40% normal blood clotting factor activity). Fully treating haemophilia may refer to increasing the blood clotting factor activity of a patient with severe, moderately severe or mild haemophilia to within the normal range (50%-150% normal blood clotting factor activity).

[0504] A patient who is partially or fully treated may require a lower dose of Factor VIII to be administered. Optionally, a patient who is partially or fully treated may not require the on-going administration of FVIII. Optionally, the method may further comprise a step of assessing whether a patient who has been partially or fully treated for haemophilia no longer needs ongoing treatment or needs a reduced level of ongoing treatment with Factor VIII, and adjusting the patient's treatment regimen appropriately, e.g. to reduce the dose or dose frequency of the Factor VIII that is to be administered, or to halt the administration of the Factor VIII.

[0505] A “therapeutically effective amount” refers to an amount effective, at dosages and for periods of time necessary, to achieve the desired therapeutic result, such as raising the level of functional factor VIII in a subject (so as to lead to functional factor VIII production at a level sufficient to ameliorate the symptoms of haemophilia A).

[0506] Optionally, the construct/viral particle is administered at a dose of less than 1×10¹¹, less than 1×10¹², less than 5×10¹², less than 2×10¹², less than 1.5×10¹², less than 3×10¹², less than 1×10¹³, less than 2×10¹³, or less than 3×10¹³ construct genomes per kg of weight of patient. Optionally, the polynucleotide, viral particle or composition is administered in a dose of at least 4.5×10¹¹, or between 4.5×10¹¹ and 1×10¹² construct genomes per kg of weight of patient (vg/kg). Optionally, the polynucleotide, viral particle or composition is administered in a dose of less than 5×10¹¹ vg/kg. Optionally, the polynucleotide, viral particle or composition is administered in a dose of between 4.5×10¹¹ vg/kg and 5×10¹¹ vg/kg, or between 4.5×10¹¹ vg/kg and 4.9×10¹¹ vg/kg. Optionally, the polynucleotide or viral particle that is administered is produced from a mammalian cell, and/or possesses characteristics which result from use of mammalian viral construct production cells and distinguish from constructs produced in insect viral construct production cells (e.g. baculovirus system).

[0507] Optionally, administration of a given dose of constructs/viral particles —quantified in terms of the number of construct genomes—is achieved using qPCR to titrate construct genomes.

[0508] The transgene cassette is also sometimes known as a transgene expression cassette.

[0509] Methods of performing qPCR are known to those of skill in the art. Using a real-time PCR cycler and DNA-binding dye such as SYBR Green (ThermoFisher Scientific) the amplification of nascent double-stranded amplicons can be detected in real time. Known quantities of the qPCR template genetic material (e.g. the promoter region) may then be serially diluted to create a standard curve, and sample construct genome titre interpolated from the standard curve.

### EXAMPLES

### Example 1—General Materials and Methods

[0510] FVIII Constructs

[0511] The cDNA of human FVIII-SQ (encoding FVIII containing a 14 amino acid linker region in place of the B domain, (Lind et al. 1995. Eur J Biochem 232, 19-27) was cloned into a liver-specific promoter-driven adeno-associated virus (AAV) vector (FLJ-PL207).

[0512] Different elements of the AAV construct were optimised to improve expression. 21 different codon optimised FVIII variants were designed and all were based on FVIII-SQ. 21 FVIII-SQ sequences were codon optimised on the basis of highly liver-expressed proteins, and tested for improved expression relative to wild type FVIII coding sequence. Over ten signal peptides derived from liver-expressed plasma proteins were tested in conjunction with the FVIII-SQ transgenes. To reduce the AAV recombinant genome size, a number of small liver-specific transcription regulatory elements including truncated HLP2-derived promoters were designed and tested with the FVIII-SQ transgenes.

[0513] Numerous FVIII-SQ internal deletion variants were generated by site-directed mutagenesis of the AAV-FVIII-SQ template using the Q5 Site-Directed Mutagenesis kit (NEB) following manufacturer's instructions, and sequenced for confirmation.

[0514] Generation of AAV Vectors

[0515] AAV particles were produced by triple plasmid transfection of HEK293T cells with plasmids encoding the AAV Rep and Cap functions; adenoviral helper functions; and the recombinant genome containing the FVIII expression cassette flanked by AAV2 ITRs. Cell pellet and supernatant were harvested 72 hours post-transfection and AAV particles purified by affinity chromatography using resins such as POROS Capture Select and AVB Sepharose. AAV was then dialysed into PBS overnight, stored at 4° C. and titred by qPCR.

[0516] Assays

[0517] FVIII Chromogenic Activity Assay

[0518] The Biophen FVIII:C chromogenic assay (Hyphen BioMed, ref 221406) measures the cofactor activity of FVIII (FVIII:C).

[0519] Through thrombin activation, the FVIII:C polypeptide forms a complex with human Factor IXa, phospholipids and calcium. Under these conditions, Factor X, provided in this assay at a specific concentration and in excess, is converted into Factor Xa (activated). This Factor Xa produced is directly proportional to FVIII:C, the limiting factor. Factor Xa is directly measured by a chromogenic substrate, Sxa-11. Factor Xa cleaves the chromogenic substrate and releases pNA. Production of pNA is proportional to Factor Xa activity, which is directly related to FVIII:C activity. The level of pNA released can be determined by measuring colour development at 405 nm, and this is relative to the amount of the Factor Xa polypeptide generated by Factor VIII:C in the sample, which is proportional to the activity of FVIII:C in the sample.

[0520] The assay is performed according to manufacturer's instructions. Briefly, to a microplate well, preincubated at 37° C., 50 μl of calibrator plasmas, diluted (in reagent R4) test plasmas or cell supernatants/lysates or controls, is added, followed by 50 μl each of reagent R1 and R2, which are reconstituted with 6 mL of distilled water and prewarmed to 37° C. After mixing, these components form a 150 μl reaction that is allowed to incubate for 5 min at 37° C. Subsequently, the reaction is supplemented with reagent R3, which is itself resuspended in 6mL of distilled water and prewarmed to 37° C., and the 200 μL mix is allowed to incubate for a further 5 min at 37° C. The reaction is stopped by adding 50 μl of 20% acetic acid or citric acid (20 g/l), before measuring the absorbance of the resulting 250 μl mixture at 405 nm.

[0521] Reagents:

[0522] R1—Human Factor X, lyophilized in presence of a fibrin polymerization inhibitor.

[0523] R2—Activation Reagent-Factor IXa (human), at a constant and optimized concentration, containing human thrombin, calcium and synthetic phospholipids, lyophilized.

[0524] R3 —SXa-11-Chromogenic substrate, specific for Factor Xa, lyophilized, with a thrombin inhibitor.

[0525] R4—Tris-BSA Buffer. Contains 1% BSA, PEG, FVIII:C Stabilizer and sodium azide (0.9g/L).

[0526] In relation to the readout from the chromogenic activity assay, the “% FVIII activity” (also referred to as “% FVIII:C”) is the “% normal” which means, for example in the context of expressing a FVIII expression cassette in HuH-7 cells, that relative to a human plasma sample having 100% FVIII activity, the FVIII activity detected in a supernatant following expression of a FVIII expression cassette in HuH-7 cells is a specified % of the FVIII activity detected in said human plasma sample having 100% FVIII activity.

[0527] FVIII Sandwich ELISA Antigen Assay

[0528] The Asserachrom VIII:Ag kit (Stago Diagnostica, ref 00280) is an antigenic assay for quantification of FVIII in plasma by enzyme-linked immunosorbent assay (ELISA). FVIII in assayed samples is captured by a mouse-monoclonal anti-human VIII:Ag antibody, pre-coating the walls of a plastic microplate well. Following sufficient incubation and washing to reduce non-specific binding, mouse anti-human FVIII antibodies, coupled to peroxidase, bind to the remaining free antigenic determinants of the captured FVIII. The bound peroxidase is then revealed by TMB substrate. The colour development induced by TMB is halted by the addition of a strong acid. The intensity of the colour development is directly proportional to the FVIII concentration in the assayed sample, determined by measuring the absorbance at 450 nm.

[0529] The readout from this assay may be expressed as “% normal” which means, for example in the context of expressing FVIII constructs in mice, that relative to a human plasma sample having 100% FVIII activity, the number of FVIII molecules (strictly, epitopes) detected in a mouse plasma sample is a specified % of the number of FVIII molecules/epitopes detected in said human plasma sample having 100% FVIII activity.

[0530] In both the activity and antigen assays described above, FVIII (activity or antigen levels) is quantified in mouse, or human cell supernatant, samples using the manufacturer recommended or included lyophilized human plasma samples of known FVIII activity or antigen (as appropriate), calibrated against the WHO International Standard (NIBSC code 07/316).

### Example 2—Codon-Optimisation of FVIII-SQ Coding Sequence

[0531] In an attempt to optimise expression of the FVIII-SQ protein in human liver cells, various codon-optimisation algorithms were applied to the ‘wild type’ coding sequence for FVIII-SQ (i.e. the wild type sequence encoding human FVIII, but with internal deletion necessary to encode FVIII-SQ). Codon optimisation algorithms were given codon bias inputs based on particular genes known to express highly into plasma from the liver; in some cases multiple gene sequences were used as inputs.

[0532] The output sequences were analysed and, where possible, CpG dinucleotides were removed (in some cases a CpG position was retained, for example if removing it would generate a potential cryptic splice set; sequences were also examined for the presence of these). A summary of the codon usage of the sequences is shown in FIG. 4.

[0533] The 21 codon-optimised FVIII-SQ sequences (named “Co1”, “Co2” etc.) were synthesised and cloned into a plasmid between the HLP2 promoter and bovine growth hormone poly A (BgpA, SEQ ID NO:66).

[0534] In Vitro Evaluation of Codon-Optimised FVIII-SQ Coding Sequences

[0535] Huh7 cells were transfected with the plasmids containing the respective codon-optimised FVIII-SQ sequences, using FuGENE® HD (Promega) transfection reagent and following the manufacturer's protocol.

[0536] To monitor the transfection efficiency, a plasmid expressing green fluorescent protein (GFP) from the strong, ubiquitously-expressed CMV promoter (CMV-GFP)—included as 10% of the total plasmid amount—was included in each case. The activity of secreted FVIII in the supernatant was measured at day 3 post-plasmid transfection by using a chromogenic assay (Biophen FVIII:C chromogenic assay —see Example 1), following manufacturer's instructions for end point quantification. GFP expression in the cells was measured using a FACS LSRFortessa X-20. GFP expression was used as internal control to normalise the FVIII activity.

[0537] FIG. 2A shows that following plasmid transfection (and normalisation of FVIII activity to GFP expression) a high level of FVIII activity was detected from FVIII-SQ-col (SEQ ID NO:4), FVIII-SQ-cot (SEQ ID NO:5), FVIII-SQ-co3 (SEQ ID NO:6) and FVIII-SQ-co 19 (SEQ ID NO:3), compared to the other codon-optimised FVIII-SQ constructs. Accordingly, these constructs were selected for further characterisation in vivo.

[0538] In Vivo Evaluation of Codon-Optimised FVIII-SQ Coding Sequences

[0539] Based on the observation in vitro that FVIII-SQ-col, 2, 3 and 19 appeared to show the highest activity values, this experiment compared the level of FVIII-SQ antigen (i.e. expressed protein) expressed from these four codon-optimised sequences in vivo.

[0540] To assess FVIII-SQ antigen level in vivo, C57B1/6 mice were injected with single stranded AAV8 vectors containing the FVIII-SQ codon-optimised genes cloned between FRE1 promoter and BgpA poly A, i.e. AAV-FRE1-FVIII-SQ-col-BgpA, AAV-FRE1-FVIII-SQ-co2-BgpA, AAV-FRE1-FVIII-SQ-co3-BgpA and AAV-FRE1-FVIII-SQ-co19-BgpA constructs.

[0541] All AAV8 packaged viruses for this study were titered at the same time by qPCR method. 6-8 week old C57B1/6 mice were injected with 1.5×10¹²vg/kg of one of the single stranded AAV8 vectors described above. As a control, 1.5×10¹²vg/kg of ssAAV-FRE1-FVIII-SQ wt-BgpA (wild type coding sequence for FVIII-SQ (SEQ ID NO: 7)) was also administered intravenously. 5 mice were injected per vector.

[0542] Four weeks post-injection, blood was collected into citrate anticoagulant and FVIII-SQ antigen level was analysed by Asserachrom VIII:Ag ELISA kit (see Example 1) following manufacturer's instructions. As shown in FIG. 2B, the FVIII-SQ antigen data demonstrated higher FVIII-SQs levels from co3, and in particular col9 (all four codon-optimised sequences were improved relative to wild type). FVIII-SQ-col9 was selected as the codon-optimisation for use in the final FVIII construct.

[0543] Interestingly, when the 21 codon-optimised sequences are multiply aligned using Clustalw (FIG. 3A), the four highest-expressing sequences are clustered by the program (FIG. 3A), reflecting that these sequences are a distinct group (boxed area in FIG. 3B) within the complete set of sequences on account of the higher degree of sequence identity within the group than between members of the group and sequences not in the group (FIG. 3A).

### Example 3 —internally-deleted FVIII variants to reduce size of FVIII transgene

[0544] Using the FVIII-SQ-cot codon-optimised sequence as a starting point, numerous shorter FVIII variant coding sequences were produced, wherein the encoded variants lacked the SQ linker as well as lacking additional stretches of sequence of various lengths immediately N-terminal, or C-terminal, or both, of the SQ linker, and within the region defined herein as the Beta Domain Related region (BDR region). FIG. 5 schematically depicts the deleted regions for each of the numbered variant sequences (variant ‘95’ is FVIII-SQ, while variant ‘85’ is FVIII RE (Lind et al. supra)), and also shows a number of ‘compound deletions’ comprising a combination of individual deleted stretches (e.g. the ‘96-106’ variant consisting of the deleted regions from the ‘96’ and ‘106’ variants).

[0545] To assess the impact of these deletions on the resulting shorter FVIII variant proteins, the variant coding sequences were cloned into commercially available expression vector pcDNA5-FRT (Invitrogen). Plasmid DNA was transfected into expi293 suspension cells (Invitrogen) in 96 Deep-well plates according to the manufacturer's protocol and incubated in a humidified 8% CO2 incubator at 37° C., shaking at 400rpm for 5 days. Cell cultures were then centrifuged at 1000×g for 5min at 4° C. and the supernatants collected for immediate testing in chromogenic activity, and antigen quantification (ELISA), assays described in Example 1.

[0546] FVIII specific activity was calculated as the ratio: FVIII activity divided by FVIII quantity (antigen). FIG. 6 shows the fold-change in specific activity exhibited by the variants 96 to 117 relative to the FVIII-SQ (‘95’) starting point.

### Example 4—Shorter, Heterologous Alternatives to Native FVIII Signal Peptide

[0547] To investigate whether the FVIII transgene could be further shortened, and/or expression enhanced, a number of alternative signal peptides (SPs)—derived from highly-secreted liver proteins—were tested in the place of the native FVIII signal peptide (which is 57 base pairs in length).

[0548] Details of the signal peptides are provided in the below table:

| SP | Encoding sequence length |
|---|---|
| number | (base pairs) |
| SP2 | 54 |
| SP3 | 72 |
| SP4 | 54 |
| SP5 | 54 |
| SP6 | 57 |
| SP7 | 66 |
| SP8 | 72 |
| SP9 | 57 |
| SP10 | 54 |
| SP11 | 84 |
| SP12 | 84 |
| SP13 | 60 |
| SP14 | 57 |

[0549] In Vitro Evaluation of Heterologous Signal Peptides

[0550] FVIII-SQ-co2 sequences respectively comprising the various heterologous signal peptides (encoded by native nucleotide sequences) instead of the native FVIII signal peptides were synthesised and cloned into a plasmid between the FREI promoter and bovine growth hormone poly A (BgpA).

[0551] Huh7 cells were transfected with the plasmids using FuGENE® HD (Promega) transfection reagent and following the manufacturer's protocol.

[0552] To monitor the transfection efficiency, a plasmid expressing green fluorescent protein (GFP) from the strong, ubiquitously-expressed CMV promoter (CMV-GFP)—included as 10% of the total plasmid amount—was included in each case. The activity of secreted FVIII in the supernatant was measured at day 3 post-plasmid transfection by using a chromogenic assay (Biophen FVIII:C chromogenic assay —see Example 1), following manufacturer's instructions for end point quantification (data not shown). GFP expression in the cells was measured using a FACS LSRFortessa X-20. GFP expression was used as internal control to normalise the FVIII activity.

[0553] On the basis of relative activity levels and the lengths of the signal peptides, a subset of signal peptides including SPs 5 (amino acid sequence MKLLAATVLLLTICSLEG, SEQ ID NO:56), 8 (sequence MPSSVSWGILLLAGLCCLVPVSLA, SEQ ID NO:60) and 10 (sequence MKWVWALLLLAALGSGRA, SEQ ID NO:58) were tested in vivo.

[0554] In Vivo Evaluation of Heterologous Signal Peptides

[0555] From the preceding in vitro work, a subset of signal peptides were selected for in vivo testing, again using FVIII-SQ antigen quantity as the readout.

[0556] C57Bl/6 mice were injected intravenously with single stranded AAV8 vectors containing FVIII-SQ-cot sequences with the native FVIII signal peptide-encoding sequence (codon-optimised sequence), or the respective heterologous signal peptide-encoding sequences (native sequences) positioned immediately 5′ in place of the native FVIII signal peptide-encoding sequence. The resulting FVIII-SQ genes were cloned between HLP2 promoter and BgpA poly A.

[0557] All AAV8 packaged viruses for this study were titered at the same time by qPCR method.

[0558] 6-8 week old C57Bl/6 mice were injected with 1.5×10¹²vg/kg of one of the single stranded AAV8 vectors described above. 5 mice were injected per vector.

[0559] Four weeks post-injection, blood was collected into citrate anticoagulant and FVIII-SQ antigen level was analysed by Asserachrom VIII:Ag ELISA kit (see Example 1) following manufacturer's instructions. FIG. 7 reveals that each of SPs 5, 8 and 10 resulted in elevated FVIII antigen levels relative to the native FVIII SP. Taking into account the short length of SP5 and the good performance in human cells in vitro, SP5 was selected for use in the final FVIII construct.

[0560] Further In Vitro Evaluation of SP5

[0561] The activity of secreted FVIII in the supernatant was measured day 3 post-AAV transduction by using a chromogenic assay (Biophen FVIII:C chromogenic assay—see Example 1), following manufacturer's instructions for end point quantification. Huh7 cells were transduced with an AAVS3 expressing FVIIIco19-SQ coding sequences having a wild-type (native FVIII) signal peptide (codon optimised coding sequence) or signal peptide 5 (SP5) (native coding sequence). The AAV construct also comprised AAV2 ITRs, the FRE72 TRE and synthentic polyA (SpA). The activity was measured at different doses of the vector. As shown in FIG. 11, there was a higher level of FVIII secretion detected at various MOI when using SP5 compared to the wild-type signal peptide.

### Example 5—Additional Materials and Methods for Examples 6-8

[0562] FVIII constructs

[0563] The cDNA of human FVIII-SQ (encoding FVIII containing a 14 amino acid linker region in place of the B domain, as discussed above) was cloned into a liver-specific promoter-driven adeno-associated virus (AAV) vector.

[0564] Two different codon optimised FVIII variants (termed “co02” (SEQ ID NO: 5) and “col9” (SEQ ID NO: 3)) were used. To reduce the AAV recombinant genome size, a number of small liver-specific promoters were designed as set out below.

[0565] Generation of AAV Vectors

[0566] AAV particles were produced by triple plasmid transfection of HEK293T cells with plasmids encoding the AAV Rep and Cap functions; adenoviral helper functions; and the recombinant genome containing the FVIII expression cassette flanked by AAV2 ITRs. Cell pellet and supernatant were harvested 72 hours post-transfection and AAV particles purified by affinity chromatography using resins such as POROS Capture Select and AVB Sepharose. AAV was then dialysed into PBS overnight, stored at 4° C. and titred by qPCR.

### Example 6—Design and Selection of Small Liver-Specific Transcription Regulatory Elements

[0567] A number of different TREs were designed based on the HLP2 TRE and selected based on overall length. Deletions to the TRE were applied, based on looking at conserved regions in the related alpha-1-antitrypsin TRE in various vertebrates. It was surprisingly found that TREs could be made which are significantly shorter than the HLP2 TRE but which retain a degree of functionality. In some cases the level of activity is at least comparable to the HLP2 TRE, as shown in the examples below.

[0568] The transcription regulatory element FRE72 (SEQ ID NO: 51) was designed and compared to the HLP2 TRE.

[0569] In order to determine the minimum length required to obtain a transcription regulatory element having at least a basic level of functionality, three further transcription regulatory elements were designed and tested:
[0570] FRE46 consists of the “core nucleotide sequence” defined by SEQ ID NO: 43. FRE46 therefore corresponds to nucleotides 170-242 of SEQ ID NO:52 and is 73 nucleotides in length;
[0571] FRE47 consists of the “core nucleotide sequence” defined by SEQ ID NO: 43 together with a TSS sequence defined by SEQ ID NO: 44 located 3′ to the “core nucleotide sequence”. FRE47 therefore corresponds to nucleotides 170-242 plus nucleotides 297-302 of SEQ ID NO: 52 and is 79 nucleotides in length;
[0572] FRE48 consists of the “extended core nucleotide sequence” defined by SEQ ID NO: 50 together with a TSS sequence defined by SEQ ID NO: 44 located 3′ to the “extended core nucleotide sequence”. FRE48 therefore corresponds to nucleotides 163-242 plus nucleotides 297-302 of SEQ ID NO: 52 and is 86 nucleotides in length.

### Example 7—In Vitro Assessment

[0573] To evaluate the activity of the designed transcription regulatory elements (TREs) in vitro, hepatocyte derived cellular carcinoma cell line Huh7 was transiently transfected with candidate plasmids comprising the TREs (either HLP2 (for comparison purposes) or one of those defined in Example 6 above) positioned upstream of a designated “co02” codon-optimised transgene for a human clotting factor VIII variant (FVIII-SQ). The “co02” sequence is provided as SEQ ID NO: 5. The transgene and transcription regulatory element were flanked by ITRs from AAV2. In total 2.5×10⁵ Huh7 cells were seeded per well of a 12 well plate in DM EM low glucose +10% FBS +glutamax (D10 medium). Experiments were performed in triplicate.

[0574] For plasmid transient transfection, following FuGENE® HD Transfection protocol, 24 hours post cell seeding, 1.8 μg of the candidate plasmid and 0.2 μg CMV-Luciferase plasmids were mixed and added to FuGENE HD Reagent (8 _{f}iL). CMV-Luciferase plasmid (10% of the total plasmid) was included in each transfection in order to monitor the transfection efficiency.

[0575] Post transfection (around 18 hours later), the medium was replaced with 500 μl fresh DM EM low glucose+10% FBS+glutamax (D10 medium). 24 h later, medium was replaced by fresh DMEM low glucose+glutamax (D0 media). Cells and medium were harvested the following day, i.e. at day 3 post-transfection.

[0576] FVIII activity was assessed using the BIOPHEN FVIII:C(6) (ref. 221406) kit. The absorbance was measured on SpectraMax i3. In parallel, cells were lysed (Promega E397A lysis buffer) and subjected to a Luciferase assay (Promega E1501) to measure the Luciferase expression. Luciferase expression was used as an internal control to normalise the FVIII activity. Analysis was performed using the software Graphpad Prism v7.

[0577] The results of the in vitro experiments are shown in FIG. 8 (panels A-C and D-F). The most relevant panels are FIG. 8C and 8F, which show the relative mean FVIII expression achieved by the various TREs when normalised to the level of transfection.

### Example 8—In Vivo Assessment

[0578] AAV particles were produced as described above having a genome comprising a codon-optimised nucleotide sequence (designated “col9”) encoding a human FVIII-SQ (i.e. a FVIII containing a 14bp linker region in place of the B domain, as described e.g. in Lind et al. 1995 supra) encapsidated by an AAV8 capsid. The “co 19” sequence is provided as SEQ ID NO: 3. AAV particles were produced as described above by triple plasmid transfection of HEK293T cells with plasmids encoding the AAV Rep and Cap functions; an adenoviral helper function;

[0579] and the recombinant genome containing the respective TRE to be tested, positioned upstream of the “co19” FVIII-SQ expression cassette, with the genome being flanked by AAV2 ITRs. Cell pellet and supernatant were harvested 72 hours post-transfection and AAV particles purified by affinity chromatography using resins such as POROS Capture Select and AVB Sepharose. AAV was then dialysed into PBS overnight, stored at 4° C. and titered by qPCR.

[0580] 6-8-week-old male C57BL/6 mice were intravenously injected with 2×10¹² vg/kg viral vector. Six mice were injected per construct. On day 28 post-injection the mice were culled, and blood harvested into citrate anticoagulant. Blood and murine liver were provided for analysis.

[0581] Blood was used to carry out FVIII analysis while liver biopsies were used to calculate the vector genome.

[0582] To determine the number of vector genomes per liver cell post-AAV injection, DNA was isolated from frozen liver samples, approximately 40 mg, using QIAGEN DNeasy Blood and Tissue Kit (QIAGEN) following manufacturers' instructions. Quantitative real-time PCR (q-PCR) amplification was carried out using the PowerUp SYBR Green Master mix (Applied Biosystems) according to the manufacturer's instructions. q-PCR was performed on a QuantStudio™ instrument (Applied Biosystems). The primer sets are designed to quantify the transgene, allowing an estimation of AAV copy number. Genome copy number was calculated from the standard curve and after normalization to mouse GAPDH quantified by qPCR.

[0583] To determine the levels of FVIII protein post-AAV injection, FVIII antigen level from citrated plasma was measured by Asserachrom VIII:Ag ELISA kit (Diagnostica Stago) following manufacturer's instructions. Further dilutions were performed when deemed necessary.

[0584] Results are shown in FIG. 9. The most relevant panel is FIG. 9C, which shows the relative FVIII level, normalised to the viral genome level per cell.

### Example 9—In Vivo Evaluation of Internally-Deleted FVIII Transgene Construct

[0585] As a rapid way to comparatively assess construct performance in vivo, hydrodynamic tail vein plasmid injection (HDTVI) was used to compare FVIII variant ‘96-106’, carrying a deletion of 132 base pairs relative to FVIII-SQ, against FVIII-SQ, in terms of FVIII activity. These FVIII variant coding sequences, comprising non-codon-optimised sequences encoding heterologous signal peptide 10 (SP10) in place of the native FVIII signal peptide, were cloned (without promoter), into plasmid pLIVE under the control of mouse albumin promoter.

[0586] Sp10-FVIIIco19-SQ, Sp10-FVIIIco19-(96-106) and comparator FVIIIco-SQ sequences were cloned into pLIVE plasmid, under the control of albumin promoter, upstream of the polyadenylation site of pLIVE plasmid.

[0587] On day 0, 8-16 weeks old C7BL/6 Factor VIII-knockout (FVIII-KO) mice were weighed in order to calculate an accurate dose. Plasmid DNA was diluted to a total of 25 μg in a volume of isotonic dosing solution volume equal to 10% of body weight (v/w) and warmed to 25-37° C. prior to injection. (For example, 2.5 ml injection volume for 25 g mouse.) Plasmid DNA was diluted immediately before dosing as this is known to improve expression.

[0588] Dosing solution was drawn into a sterile 5 ml syringe, clearing any air bubbles. Mice were warmed in a heat box set to 38° C. for 10 min prior to administering isoflurane anaesthesia in order to dilate the tail vein. Whilst maintaining anaesthesia via a nose cone, mice were injected via the tail vein with dosing solution at a defined pressure over a period of 4-8 s. Heart rate and oxygen saturations were recorded throughout using a portable oxygen saturation monitor to enable monitoring of the expected changes in these parameters. Once the needle was removed, slight pressure was applied to stop any bleeding. Isoflurane anaesthesia was removed and the animal allowed to recover in a warm environment.

[0589] The plasmids injected included:
[0590] pLIVE-SP10-FVIIIco19-SQ
[0591] pLIVE-SP10FVIIIco19-(96-106)
[0592] pLIVE-comparator-FVIIIco-SQ

[0593] pLIVE-[SP10-FVIIIco19-SQ] contains the FVIII-SQ variant, encoded by the ‘co19’ codon-optimisation, with (non-codon-optimised) SP10 signal peptide. The transgene is under the control of the mouse albumin promoter and utilises the pLIVE polyA sequence. pLIVE-[SP10-FVIIIco19-(96-106)] is identical except for the encoded FVIII variant contains the 96-106 deletion. pLIVE[comparator-FVIIIco-SQ] contains a codon-optimised FVIII-SQ with native signal peptide corresponding to SEQ ID NO: 54, and is encoded by SEQ ID NO:37. 3 days post injection, between 100 and 200 μl of blood was collected from each mouse by retro-orbital puncture with non-heparinised blue capillary tubes on citrate (1:9 ratio of the total volume of blood). Plasma was prepared by centrifugation for 20 min at 4000 rpm.

[0594] The plasma from animals injected with the above plasmids was analysed for FVIII activity by chromogenic assay described in Example 1. FVIII:C activity for each construct is shown in FIG. 10.

### Example 10—Assessing Tissue Specificity of FRE72

[0595] FIG. 12 shows the results of in vitro studies into the promoter fidelity of FRE72. FRE72 promoter fidelity was assessed in cell lines from a range of different tissues; Huh7: liver. HEK293T: kidney. PANC1: pancreas. BxPC-3: pancreas. MCF7: breast. 1643: neuroblastoma. MRC-9: lung. 697: early B cell. Cells were transduced with the control vector AAVS3.CAG.GFP or AAVS3.FRE72.GFP or untreated at MOI of 1×10⁵. FIG. 12 shows three columns for each cell type; the left hand column for each cell type (grey) relates to cells transduced with AAVS3.FRE72.GFP; the central column for each cell type (black) relates to cells transduced with the control vector; and the right hand column for each cell type (white) relates to untreated cells. For the HEK293T and MCF-7 cells the left hand (“grey”) column is so small that it is not visible in FIG. 12; similarly for the HEK293T, 1643 and 697 cells the right hand (“white”) columns is so small that it is not visible in FIG. 12.

### Example 11—In Vitro Evaluation of Relative Specific Activity of FVIII Substitution Mutation Variants

[0596] In silico modelling was used to predict single amino acid substitutions, and pairs of cysteine substitutions, on non-surface-exposed inter-domain surfaces, which might increase the stability of FVIII. However, any impact on stability does not necessarily equate to a beneficial effect on activity, and in some cases increased stability would have a deleterious effect, e.g. a substitution increasing stability but not allowing the necessary FVIII domain rearrangement into an active form. Numerous such substitution variants were tested in vitro as described below.

[0597] Codon-optimised nucleotide sequences encoding FVIII-SQ variants comprising one or more such substitutions were gene-synthesised and cloned into the commercially available expression vector pcDNA5-FRT (Invitrogen). Plasmid DNA was transfected into expi293 suspension cells (Invitrogen) in 96 Deepwell plates according to the manufacturer's protocol, and incubated in a humidified 8% CO₂ incubator at 37° C. shaking at 400rpm for 5 days. Cell cultures were centrifuged at 1000×g for 5min at 4° C. and the supernatants filtered through 0.2 μl filter for immediate testing in chromogenic assay and antigen quantification as described in Example 1.

[0598] Following blank subtraction, the FVIII activity readout from the chromogenic assay was divided by the FVIII antigen quantification (ELISA) readout to obtain the specific activity (SA) value.

[0599] FIG. 14A shows the fold-change in SA, relative to the FVIII-SQ (‘95’) control lacking any substitution mutations, for several different single amino-acid substitution variants, including a number of alternative substituted residues for each variant. The following table shows the identity of the substitutions corresponding to each of the numbered constructs. Variant 65 (H693W) exhibits an elevation in SA relative to 95.

| Construct no. | 58 | 59 | 60 | 61 | 62 | 65 | 67 | 68 |
|---|---|---|---|---|---|---|---|---|
| Position | L687 | | H693 | | | | N694 | |
| Substituted residue | R | W | R | I | K | W | E | W |

| Construct no. | 69 | 70 | 71 | 72 | 73 | 74 | 75 | 76 | 77 | 78 | 79 | 80 |
|---|---|---|---|---|---|---|---|---|---|---|---|---|
| Position | S695 | | | | | | | D696 | | | | |
| Substituted | R | I | L | M | F | W | Y | R | Q | F | W | K |
| residue | | | | | | | | | | | | |

[0600] In another experiment, the substitution M662W (called ‘26’) had demonstrated a marked increase in SA relative to ‘95’. For position M662 it was decided to screen the SA of all alternative substitutions. The results are shown in FIG. 14B, which also includes a double substitution, combining M662W with H693W (65 from FIG. 14A). Again see below table for the identity of the substitutions. Substitutions at position M662 with C and E appear to give some uplift in SA relative to 95. The greatest increase in SA was observed for the M662W+H693W combination.

| Construct no. | 23 | 24 | 25 | 26 | 138 | 139 | 140 | 141 | 142 | 143 |
|---|---|---|---|---|---|---|---|---|---|---|
| Position | M662 | | | | | | | | | |
| Substituted | N | Q | I | W | W + | A | R | D | C | E |
| residue | | | | | H693W | | | | | |

| Construct no. | 144 | 145 | 146 | 147 | 148 | 149 | 150 | 151 | 152 |
|---|---|---|---|---|---|---|---|---|---|
| Position | M662 | | | | | | | | |
| Substituted | G | P | S | Y | H | L | K | F | T |
| residue | | | | | | | | | |

### Example 12—In Vitro Evaluation of Relative Specific Activity of Additional FVIII Substitution Mutation Variants Predicted to Form Disulphide Bridges

[0601] Based on the in silico prediction work in Example 11, a number of pairs of cysteine substitutions were tested using the methodology described in Example 11.

[0602] The results—again expressed as fold-change in specific activity relative to FVIII-SQ (‘95’) (SEQ ID NO:3)—are shown in FIG. 15. The below table indicates the substitution pairs corresponding to the construct numbers shown in FIG. 15. Several of the C-C substitution variants show several-fold increases in specific activity relative to control.

| Construct no. | 1_S-S | 2_S-S | 3_S-S | 4_S-S | 5_S-S | 6_S-S | 7_S-S | 8_S-S | 9_S-S |
|---|---|---|---|---|---|---|---|---|---|
| C | S285C | E287C | S289C | T646C | D647C | K659C | Y664C | T667C | T667C |
| substitution | E676C | F673C | N1977C | N1950C | Y1979C | M1823C | K1967C | S1788C | A1836C |
| pair | | | | | | | | | |

| Construct no. | 10 S-S | 11 S-S | 12 S-S | 13 S-S | 14 S-S | 15 S-S | 16 S-S | 17 S-S | 18 S-S |
|---|---|---|---|---|---|---|---|---|---|
| C substitution | T669C | F671C | L687C | W688C | I689C | F697C | G102C | A108C | T118C |
| pair | V1982C | Y1979C | A1800C | S710C | G1799C | S1949C | A1974C | Q2329C | N2172C |

| Construct no. | 19_S-S | 20_S-S | 21_S-S | 22_S-S | 23_S-S | 24_S-S | 25_S-S | 26_S-S | 27_S-S | 28_S-S |
|---|---|---|---|---|---|---|---|---|---|---|
| C | V137C | M147C | S149C | P264C | I291C | N280C | T667C | T669C | S268C | N684C |
| substitution | Y2332C | E1970C | E1969C | E1951C | S1955C | S524C | G1981C | Y1979C | P672C | S1791C |
| pair | | | | | | | | | | |

| Construct no. | 29 S-S | 30 S-S | 31 S-S |
|---|---|---|---|
| C substitution | G686C | L687C | S695C |
| pair | R1803C | R1803C | E1844C |

### Example 13—Confirmatory In Vitro Testing of Particular Promising Substitution Variants

[0603] FIG. 16 confirms, for a subset of tested substitution variants of Examples 11 and 12, the fold-increase in SA relative to the FVIII-SQ (‘95’) control. The substitutions were evaluated in two FVIII ‘backgrounds’, the first being FVIII-SQ as in the above Examples:
[0604] FVIII-SQ-M662W (‘26’)
[0605] FVIII-SQ-H693W (‘65’)
[0606] FVIII-SQ-M662W-H693W (‘26-65’)
[0607] FVIII-SQ-L687C-A1800C (‘12SS’)

[0608] The second FVIII background differs from FVIII-SQ in that it contains a more extensive internal deletion encompassing, and extending on either side of, the B domain. The deleted region corresponds to amino acids positions 732-1669, and the variant protein is referred to as FVIII-(96-106).
[0609] FVIII-(96-106)-M662W (‘26-96-106’)
[0610] FVIII-(96-106)-H693W (‘65-96-106’)
[0611] FVIII-(96-106)-M662W-H693W (‘26-65-96-106’)
[0612] FVIII-(96-106)-L687C-A1800C (‘12S S-96-106’)

[0613] As FIG. 16 shows, each of the above subset of tested constructs showed an approximately 2 or more fold increase in specific activity relative to FVIII-SQ control (95).

### Example 14—In Vivo Evaluation of Internally-Deleted FVIII Transgene Construct Containing Stabilising Substitution Mutation

[0614] In this study, AAV8 vectors were made from the following constructs:
[0615] FRE72-SP5-FVIIICo19 (26-96-106)-SpA (SEQ ID NO:71)
[0616] FRE72-SP5-FVIIICo19-SQ-SpA (SEQ ID NO:73)

[0617] The above constructs contain the FRE72 promoter, signal peptide 5, and synthetic polyA. They differ in that one encodes FVIII-SQ, whilst the other encodes the shorter variant with the “96-106” internal deletion, as well as the substitution mutation “26” (=M662W).
[0618] Comparator FVIIIco-SQ

[0619] The above construct comprises a codon-optimised FVIII-SQ-encoding sequence with native FVIII signal peptide, SpA, and a liver-specific promoter. The construct has the sequence of SEQ ID NO: 72.

[0620] The AAV8-Comparator FVIIIco-SQ was respectively compared against AAV8-FRE72-5P5-FVIIICo19 (26-96-106)-SpA and AAV8-FRE72-SP5-FVIIICo19-SQ-SpA in separate experiments.

[0621] 6-8 week old C7BL/6 Factor VIII-knockout (FVIII-KO) mice were intravenously injected with 2×10¹² vg/kg of one of each of the above vectors. All AAV8 vectors for this study were titered at the same time by qPCR method.

[0622] At 6 weeks post injection, between 100 and 200 μl of blood was collected from each mouse by retro-orbital puncture with non-heparinised blue capillary tubes on citrate (1:10 dilution). Plasma was prepared by centrifugation for 20 min at 4000 rpm.

[0623] The plasma from injected and naïve animals were analysed for FVIII activity and human FVIII antigen level (assays as described in Example 1), and the ratio of FVIII activity to antigen level (i.e. specific activity) was calculated (FIG. 17).

### Example 15—Comparative Evaluation of Manufacturability and Product Quality of Internally-Deleted FVIII Transgene Construct

[0624] The impact of the minimised 4,713 nucleotide vector genome length enabled by the FRE72-SP5-EVIIICo19 (26-96-106)-SpA construct on manufacturing and quality parameters was assessed and compared against the 4,970 nucleotide comparator FVIIIco-SQ vector genome described in Example 14.

[0625] Cell Cultivation

[0626] HEK293T cells were maintained in adherent culture under standard conditions at 37° C., 95% relative humidity, and 5% v/v CO₂ in Dulbecco's Modified Eagle's Medium (DMEM) supplemented with 10% Fetal Bovine Serum (FBS) and 1% GlutaMai^{rm} (L-alanine-L-glutamine dipeptide). Cellular confluence during passaging ranged from 40-95%.

[0627] Transfection of HEK293T Cells and Preparation of Cell Lysates

[0628] HEK293T cells were transfected with helper plasmid (comprising the adenoviral helper functions and AAV2 rep gene) and vector plasmid (comprising an engineered cap gene (encoding SEQ ID NO: 68), and FRE72-5P5-EVIIICo19 (26-96-106)-SpA or comparator FVIIIco-SQ vector cassettes; see Example 14) using molar plasmid ratios of 1:3 (helper plasmid:vector plasmid) while maintaining the total plasmid DNA amount for all setups. The trans-split two plasmid system is described in WO 2020/208379. 6.0×10⁴ viable cells per cm² culture area were seeded in 15-cm dishes in a volume of 22 ml DM EM containing 10% FBS and 1% GlutaMax™ the day before transfection resulting in approximately 80% confluency on the day of transfection. PEI-DNA complexes were prepared in DMEM without supplements using the linear polyethylenimine transfection reagent PEIpro™ (Polyplus) according to the manufacturer's manual. An amount of 42 μg total plasmid DNA and a PEI-to-DNA ratio of 2:1 was maintained independent of the applied plasmids. Cells were cultured until day 3 post-transfection, harvested in the medium and lysed by three freeze-thaw cycles. Cell debris was removed by centrifugation at 3,700×g for 30 min.

[0629] Quantification of rAAV Vector Genomes

[0630] The AAV vector genome assay is based on a quantitative polymerase chain reaction (qPCR) specific for a sequence of the rAAV expression cassette.

[0631] Cell lysate test samples were subjected to a nuclease treatment procedure in order to remove non-packed vector genomes prior to performing the qPCR. To that aim the samples were pre-diluted 1:250 in nuclease-free water containing 0.124% Pluronic F-68. 25 μl of the pre-dilution were used for the digest with 2 units of Turbo DNase (ThermoFisher Scientific, Waltham, USA) and 1× Turbo DNase reaction buffer, resulting in a total reaction volume of 29 μl. Incubation was performed for 1 h at 37° C. Afterwards, 1 volume of 0.4 M NaOH was added and the samples were incubated for 45 min at 65° C. 1035 μl nuclease-free water supplemented with 0.1% Pluronic F-68 were added together with 30 μl 0.4 M HCl. To control for the quality of the Turbo DNase digest, a trending control containing unpurified cell lysate with a known AAV vector genome titre and spike-in controls using plasmid DNA carrying the transgene sequence were measured in parallel.

[0632] Per sample, 12.5 μl QuantiFast SYBR Green PCR Master Mix (Qiagen, Venlo, Netherlands) were mixed with 0.75 μl of qPCR primer working stock solution (containing 10 μM of each primer) and filled up to a volume of 20 μl with nuclease-free water. 5 μl of Turbo DNase treated cell lysate or purified virus test sample were added to the mix (total reaction volume 25 μl, final primer concentration in the reaction 300 nM each) and qPCR was performed in a CFX 96 Touch Real Time PCR cycler (Bio-Rad Laboratories Inc., Hercules, USA) with the following program steps: 95° C. 5 mM; 39 cycles (95° C. 10 s, 60° C. 30 s, plate read); 95° C. 10 sec; 60-95° C. (+0.5° C./step), 10 sec; plate read. To control for the quality of the qPCR, a trending control with known AAV vector genome titre was measured in parallel. To check for contaminants, a no template control (NTC, 5 μl H₂O) was also included. Standard row, test samples and controls were measured in triplicate for each dilution. Purified virus test samples and trending controls were generally measured in 3 different dilutions in EB buffer (10 mM Tris-Cl, pH 8.5). Turbo DNase treated cell lysate test samples were directly used in the qPCR without any further dilution. Data were analysed using the CFX Maestro Software 1.1 (Bio-Rad Laboratories Inc.).

[0633] Melting curve analysis confirmed the presence of only one amplicon. Amplification results in nascent double stranded DNA amplicons detected with the fluorescent intercalator SYBR Green to monitor the PCR reaction in real time. Known quantities of the genetic material, in the form of a linearized plasmid, were serially diluted to create a standard curve and sample vector genome titre was interpolated from the standard curve.

[0634] Quantification of rAAV Particles (Capsids)

[0635] The AAV2 Titration ELISA method is a measure of total AAV particles (capsids) and is based on a commercially available kit (Progen™, Heidelberg, Germany; catalogue number PRATV). This sandwich immunometric technique utilises monoclonal antibody A20 (Wobus et al (2000), J Virol, 74:9281-9293) for both capture and detection. The antibody is specific for a conformational epitope present on assembled capsids of serotypes AAV2, AAV3, and the engineered capsid used in these experiments.

[0636] The AAV2 Titration ELISA kit was used to quantify total AAV particles in cell lysates and purified virus preparations according to the manufacturer's instructions. In brief, 100 μl diluted AAV2 Kit Control, test samples, or trending control of engineered capsid with known total particle titre were added per well of a microtiter plate coated with monoclonal antibody A20 and incubated for 1 h at 37° C. Standard row, test samples and controls were measured in duplicates for each dilution. In a second step, 100 μl of pre-diluted biotin-conjugated monoclonal antibody A20 (1:20 in Assay Buffer [ASSB]) were added and incubated for 1 h at 37° C. Then, 100 μl of a pre-diluted streptavidin peroxidase conjugate (1:20 in ASSB) were added and incubated for 1 h at 37° C. 100 μl substrate solution (TMB [Tetramethylbenzidine]) were added and after incubation for 15 min, the reaction was stopped using 100 μl stop solution. The absorbance was measured photochemically at 450 nm using the SpectraMax M3 microplate reader (Molecular Devices, San Jose, USA). Data was analysed with the SoftMax Pro 7.0 Software (Molecular Devices).

[0637] The test samples were diluted into the assay range and AAV total particle concentrations were determined by interpolation using the standard curve which was prepared using the provided AAV2 Kit Control. ASSB was used as blank.

[0638] Vector Genome to Total Particle Ratio

[0639] The ratio of vector genomes to total AAV particles is calculated as a percentage. This is based on the vector genome titre (determined by qPCR, as described above) and the number of total AAV particles (determined by the capsid ELISA, as described above).

[0640] Quick Purification of rAAV Particles for Impurity Quantification

[0641] Clarified freeze-thaw lysates were nuclease treated to remove any non-packaged DNA followed by a one-step affinity chromatography step using AVB Sepharose HP (GE Lifesciences, Chicago, Ill.).

[0642] Quantification of Encapsidated Non-Vector Nucleic Acids

[0643] Prokaryotic DNA sequences, such as antibiotic resistance genes or parts of them originating from the bacterial backbone of the producer plasmids, can be packaged into the rAAV particles, constituting product-related impurities. Plasmid-derived impurity quantification is based on qPCRs specific for sequences of the kanamycin resistance gene (kanR), present on both helper and vector plasmid, and the AAV cap gene, which is present on the vector plasmid. Plasmid-derived impurity qPCRs were performed on the purified material from the preceding step according to the method for quantification of rAAV vector genomes outlined above with appropriate modifications to reflect the impurity templates, such as the primer pairs, standards and controls. Specifically, modifications were made to the impurity specific primer pairs, the linearized plasmid standards, the trending controls and the annealing temperatures (57° C.) in the qPCR setup.

[0644] Determination of Vector Integrity

[0645] Vector integrity, i.e. packaging of full-length vector genomes as well as homogeneity of the vector preparation (mispackaging of vector fragments or non-vector nucleic acids) was analyzed by alkaline gel electrophoresis. This assay is performed under alkaline conditions in the presence of sodium dodecyl sulfate, which frees viral genomes from AAV particles and keeps them in single stranded DNA conformation during electrophoretic separation. These DNA strands then migrate through the gel as a function of their respective size. For this assay, 1% agarose gel was prepared by heating lg of agarose in 100 ml of autoclaved deionized water. After cooling to 50° C., 2 ml of 50× alkaline electrophoresis buffer were added and the gel was cast into a 15×15 cm gel form with a thickness of approximately 0.5 to 0.7 mm and equilibrated for 15 —30 min at 4° C. Test samples were diluted to a final concentration of 1.7×10¹¹ vg/ml with nuclease-free water. For 10 μl of each sample, 2 μl of loading buffer containing 15 ng of a 1252 bp long, linear fragment of pUC19 vector as a loading control, were added and 12 μl of this mixture were loaded onto the gel. To allow size determination of nucleic acids from 200 bp to 10 kb, a molecular weight marker (Hyperladder, Bioline, London, UK) was included in the gel electrophoresis. The gel was run for 6 hat 60 V and 4° C. (2.7 V/cm) towards the cathode. After the run, the gel was equilibrated in 0.5 M Tris-HCl buffer at pH 7.9 for 15 min and then stained in 0.1 M Tris-HCl staining buffer containing 1× SybrGold (Life Technologies, Carlsbad, Calif.) for 90 min. Image acquisition of the stained gel was done on a FusionFX-7-826.EPI/SuperBright Advanced system (Vilber, Collégien, FR) with an excitation wavelength of 312 nm using the associated Fusion Capt Advance software (Vilber) for acquisition. The Bio 1D software (Vilber) was used for image processing and analysis.

[0646] Results

[0647] As is apparent from FIG. 18 the FRE72-SP5-FVIIICo19 (26-96-106)-SpA construct results in higher vector (FIG. 18A) and capsid (FIG. 18B) yields in comparison to a comparator FVIIIco-SQ construct of larger size, when the two constructs are manufactured in the same trans-split, two plasmid manufacturing system. The relative increase of vector genomes in comparison to particle (capsid) yields was more pronounced (1.69-fold vs 1.06-fold), resulting in a higher vector genome to total particle ratio (FIG. 18C) for the FRE72-SP5-FVIIICo19 (26-96-106)-SpA construct (1.53-fold).

[0648] Quantification of packaged plasmid-derived impurities, originating from the producer plasmids, demonstrated reduced mispackaging for the FRE72-SP5-FVIIICo19 (26-96-106)-SpA construct in comparison to the comparator FVIIIco-SQ construct independent of the impurity marker analyzed (FIGS. 19A and B). For mispackaged sequences originating from the kanamycin antibiotics resistance gene (kanR), a reduction to 50% of mispackaged sequences was shown for the FRE72-SP5-FVIIICo19 (26-96-106)-SpA construct in comparison to the comparator FVIIIco-SQ construct (FIG. 19A). A comparable reduction was demonstrated for rAAV capsid (cap)-derived sequences (reduction to 51%, FIG. 19B). Reductions indicate an improved quality profile of the FRE72-SP5-FVIIICo19 (26-96-106)-SpA construct compared to the comparator FVIIIco-SQ construct.

[0649] Predominant packaging of full-length vector genome sized molecules was demonstrated by alkaline gel electrophoresis (4,970 bases for comparator FVIIIco-SQ and 4,713 bases for FRE72-SP5-FVIIICo19 (26-96-106)-SpA) (FIG. 20). However, alkaline gel electrophoresis revealed an additional band between 2.5 and 3 kb for the comparator FVIIIco-SQ, which is not present in FRE72-SP5-FVIIICo19 (26-96-106)-SpA . In addition, increased background with possible additional defined signals were observed for the comparator FVIIIco-SQ in comparison to the FRE72-SP5-FVIIICo19 (26-96-106)-SpA construct. Thus increased integrity and homogeneity of the FRE72-SP5-FVIIICo19 (26-96-106)-SpA construct in comparison to the comparator FVIIIco-SQ was demonstrated by alkaline gel electrophoresis.

### Example 16—the FRE72 Promoter Provides Long-Term Expression In Vivo

[0650] An AAV vector comprising a FVIII-SQ transgene (designated FVIIIco19-SQ) under the transcriptional control of the FRE72 promotor was pseudotyped with AAV8 capsid. The overall vector genome, including ITRs, promoter and transgene, was 4845 bp long (SEQ ID NO: 73).

[0651] The resulting AAV8 vector was administered into the tail vein of C57BL6 wild type mice at 6-8 weeks of age. Vectors were stored at 4° C. prior to injection. Original viral suspensions were diluted in sterile X-vivo 10 (Lonza, BE04-380Q) in order to obtain an adequate inoculum yielding a dose of 2×10¹² vg/kg.

[0652] At days 31, 56 and 104 post-injection, a blood sample of 100u1 was taken from the lateral tail vein of each of the mice. At day 230 post-injection, terminal bleeding was performed and maximum volume (approx. 1 ml) blood sample was taken via cardiac puncture from heavily anaesthetised animals which were culled following the blood sample. Collected blood was diluted with citrate anticoagulant (1:10 dilution) and centrifuged at 5000 rpm for 5 minutes.

[0653] Plasma samples were analysed for FVIII antigen level using an FVIII sandwich ELISA antigen assay as described above in Materials and Methods. The results are shown in FIG. 21. The bars represent median values.

[0654] Numbered Aspects of the Invention

[0655] 1. A Factor VIII polypeptide comprising a Factor VIII amino acid sequence wherein the Factor VIII amino acid sequence comprises a modified beta domain related (BDR) region which is modified relative to wild-type BDR region, which wild-type BDR region corresponds to the region between positions 713 and 1697 of SEQ ID NO: 1, wherein:
[0656] (i) the modified BDR region comprises a maximum of 88 amino acids, and the Factor VIII polypeptide has a specific activity which is higher than the specific activity of a polypeptide of SEQ ID NO: 7; and/or
[0657] (ii) the modified BDR region comprises a maximum of 74 amino acids.

[0658] 2. The Factor VIII polypeptide according to aspect 1, wherein the Factor VIII polypeptide has a specific activity which is at least 50%, at least 60%, at least 70%, at least 75%, at least 80%, at least 85%, at least 90%, at least 95%, at least 98%, at least 99%, or at least 100% of the specific activity of a reference wild-type Factor VIII polypeptide.

[0659] 3. The Factor VIII polypeptide according to aspect 1 or 2, wherein the Factor VIII polypeptide has a specific activity which is higher than the specific activity of a reference wild-type Factor VIII polypeptide.

[0660] 4. The Factor VIII polypeptide according to any one of the preceding aspects, wherein the Factor VIII polypeptide has a specific activity which is at least 1.2 fold, at least 1.5 fold, at least 1.7 fold, at least 1.8 fold, at least 2 fold, at least 2.2 fold, at least 2.5 fold, at least 3 fold, at least 3.5 fold, at least 4 fold, at least 4.5 fold, at least 5 fold, or at least 5.5 fold higher than the specific activity of a reference wild-type Factor VIII.

[0661] 5. The Factor VIII polypeptide according to any one of aspects 2 to 4, wherein the reference wild-type Factor VIII sequence is the Factor VIII polypeptide of SEQ ID NO: 1.

[0662] 6. The Factor VIII polypeptide according to any one of the preceding aspects, wherein the Factor VIII polypeptide has a specific activity which is at least 50%, at least 60%, at least 70%, at least 75%, at least 80%, at least 85%, at least 90%, at least 95%, at least 98%, at least 99%, or at least 100% of the specific activity of the Factor VIII polypeptide of SEQ ID NO: 7.

[0663] 7. The Factor VIII polypeptide according to any one of the preceding aspects, wherein the Factor VIII polypeptide has a specific activity which is higher than the specific activity of the Factor VIII polypeptide of SEQ ID NO: 7.

[0664] 8. The Factor VIII polypeptide according to any one of the preceding aspects, wherein the Factor VIII polypeptide has a specific activity which is at least 1.2 fold, at least 1.5 fold, at least 1.7 fold, at least 1.8 fold, at least 2 fold, at least 2.2 fold, at least 2.5 fold, at least 3 fold, at least 3.5 fold, at least 4 fold, at least 4.5 fold, at least 5 fold, or at least 5.5 fold higher than the specific activity of the Factor VIII polypeptide of SEQ ID NO: 7.

[0665] 9. The Factor VIII polypeptide according to any one of the preceding aspects, wherein the Factor VIII polypeptide has a specific activity which is at least 50%, at least 60%, at least 70%, at least 75%, at least 80%, at least 85%, at least 90%, at least 95%, at least 98%, at least 99%, or at least 100% of the specific activity of the Factor VIII polypeptide of SEQ ID NO: 8.

[0666] 10. The Factor VIII polypeptide according to any one of the preceding aspects, wherein the Factor VIII polypeptide has a specific activity which is higher than the specific activity of the Factor VIII polypeptide of SEQ ID NO: 8.

[0667] 11. The Factor VIII polypeptide according to any one of the preceding aspects, wherein the Factor VIII polypeptide has a specific activity which is at least 1.2 fold, at least 1.5 fold, at least 1.7 fold, at least 1.8 fold, at least 2 fold, at least 2.2 fold, at least 2.5 fold, at least 3 fold, at least 3.5 fold, at least 4 fold, at least 4.5 fold, at least 5 fold, or at least 5.5 fold higher than the specific activity of the Factor VIII polypeptide of SEQ ID NO: 8.

[0668] 12. The Factor VIII polypeptide according to any one of the preceding aspects, wherein the Factor VIII polypeptide has a specific activity which is higher than the specific activity of the Factor VIII polypeptide encoded by SEQ ID NO: 37.

[0669] 13. The Factor VIII polypeptide according to any one of the preceding aspects, wherein the Factor VIII polypeptide has a specific activity which is higher than the specific activity of the Factor VIII polypeptide encoded by SEQ ID NO: 38.

[0670] 14. The Factor VIII polypeptide according to any one of the preceding aspects, wherein the specific activity is measured using a chromogenic assay.

[0671] 15. The Factor VIII polypeptide according to any one of the preceding aspects, wherein the specific activity is measured using a clotting assay, optionally a one-stage clotting assay.

[0672] 16. The Factor VIII polypeptide according to any one of the preceding aspects, wherein the modified BDR region comprises a maximum of 87, 85, 80, 75, 70, 65, 60, 55, 50, or 45 amino acids.

[0673] 17. The Factor VIII polypeptide according to any one of the preceding aspects, wherein the modified BDR region comprises a maximum of 74 amino acids.

[0674] 18. The Factor VIII polypeptide according to any one of the preceding aspects, wherein the modified BDR region comprises a maximum of 47 amino acids.

[0675] 19. The Factor VIII polypeptide according to any one of the preceding aspects, wherein the modified BDR region comprises a maximum of 45 amino acids.

[0676] 20. The Factor VIII polypeptide according to any one of the preceding aspects, wherein the modified BDR region comprises at least 20, at least 25, at least 28, at least 30, at least 35, at least 40, at least 45, at least 50, at least 54, at least 55, at least 57, at least 58, at least 60, or at least 65 amino acids.

[0677] 21. The Factor VIII polypeptide according to aspect 20, wherein the modified BDR region comprises at least 28 amino acids.

[0678] 22. The Factor VIII polypeptide according to aspect 20, wherein the modified BDR region comprises at least 30 amino acids.

[0679] 23. The Factor VIII polypeptide according to any one of the preceding aspects, wherein the modified BDR region consists of between 20 and 89, between 25 and 89, between 27 and 89, between 27 and 80, between 27 and 75, between 27 and 70, between 27 and 65, between 27 and 60, between 27 and 55, or between 27 and 50 amino acids.

[0680] 24. The Factor VIII polypeptide according to any one of aspects 1 to 22, wherein the modified BDR region consists of between 30 and 89, between 30 and 89, between 30 and 80, between 30 and 75, between 30 and 70, between 30 and 65, between 30 and 60, between 30 and 55, or between 30 and 50 amino acids.

[0681] 25. The Factor VIII polypeptide according to any one of aspects 1 to 22, wherein the modified BDR region consists of between 27 and 48, between 30 and 48, between 33 and 48, between 35 and 48, between 40 and 48, or between 42 and 48 amino acids.

[0682] 26. The Factor VIII polypeptide according to any one of aspects 1 to 22, wherein the modified BDR region consists of between 28 and 48 amino acids.

[0683] 27. The Factor VIII polypeptide according to any one of aspects 1 to 22, wherein the modified BDR region consists of between 30 and 48 amino acids.

[0684] 28. The Factor VIII polypeptide according to any one of aspects 1 to 22, wherein the modified BDR region consists of around 45 amino acids.

[0685] 29. The Factor VIII polypeptide according to any one of aspects 1 to 22, wherein the modified BDR region consists of between 40 and 75, between 40 and 70, between 40 and 65, or between 40 and 60 amino acids.

[0686] 30. The Factor VIII polypeptide according to any one of aspects 1 to 22, wherein the modified BDR region consists of between 53 and 89, between 53 and 75, between 56 and 75, between 57 and 75, or between 60 and 75 amino acids.

[0687] 31. The Factor VIII polypeptide according to aspect 29, wherein the modified BDR region consists of between 40 and 60 amino acids.

[0688] 32. The Factor VIII polypeptide according to any one of aspects 1 to 27 or 29 to 31, wherein the modified BDR region consists of around 54 amino acids.

[0689] 33. The Factor VIII polypeptide according to any one of the preceding aspects, wherein the Factor VIII amino acid sequence does not comprise at least 806, at least 810, at least 820, at least 835, at least 850, at least 875, or 894 amino acids corresponding to positions 746 to 1639 of SEQ ID NO: 1.

[0690] 34. The Factor VIII polypeptide according to any one of the preceding aspects, wherein the Factor VIII amino acid sequence does not comprise at least 820, at least 825, at least 834, at least 850, at least 875, or 908 amino acids corresponding to positions 741 to 1648 of SEQ ID NO: 1.

[0691] 35. The Factor VIII polypeptide according to any one of the preceding aspects, wherein the Factor VIII amino acid sequence comprises at least 650, at least 700, at least 710, or 713 amino acids corresponding to positions 1 to 713 of SEQ ID NO: 1.

[0692] 36. The Factor VIII polypeptide according to any one of the preceding aspects, wherein the Factor VIII amino acid sequence comprises at least 550, at least 600, at least 620, or 636 amino acids corresponding to positions 1697 to 2332 of SEQ ID NO: 1.

[0693] 37. The Factor VIII polypeptide according to any one of the preceding aspects, wherein the Factor VIII amino acid sequence does not comprise at least one amino acid(s) corresponding to positions 724 to 740 of SEQ ID NO: 1.

[0694] 38. The Factor VIII polypeptide according to any one of the preceding aspects, wherein the Factor VIII amino acid sequence does not comprise at least 2, at least 3, at least 4, at least 5, at least 6, at least 7, at least 8, at least 9, at least 10, at least 11, at least 12, at least 13, at least 14, at least 15, at least 16, or 17 amino acids corresponding to positions 724 to 740 of SEQ ID NO: 1.

[0695] 39. The Factor VIII polypeptide according to any one of the preceding aspects, wherein the Factor VIII amino acid sequence does not comprise 17 or fewer, 16 or fewer, 15 or fewer, 14 or fewer, 13 or fewer, 12 or fewer, 11 or fewer, 10 or fewer, 9 or fewer, 8 or fewer, 7 or fewer, 6 or fewer, 5 or fewer, 4 or fewer, 3 or fewer, or 2 or fewer amino acids corresponding to positions 724 to 740 of SEQ ID NO: 1.

[0696] 40. The Factor VIII polypeptide according to any one of the preceding aspects, wherein the Factor VIII amino acid sequence does not comprise between 2 and 18, between 5 and 16, or between 8 and 13 amino acids corresponding to positions 724 to 740 of SEQ ID NO: 1.

[0697] 41. The Factor VIII polypeptide according to any one of the preceding aspects, wherein the Factor VIII amino acid sequence does not comprise at least 2 contiguous amino acids corresponding to positions 724 to 740 of SEQ ID NO: 1.

[0698] 42. The Factor VIII polypeptide according to any one of the preceding aspects, wherein the Factor VIII amino acid sequence does not comprise at least 3, at least 4, at least 5, at least 6, at least 7, at least 8, at least 9, at least 10, at least 11, at least 12, at least 13, at least 14, at least 15, at least 16, or 17 contiguous amino acids corresponding to positions 724 to 740 of SEQ ID NO: 1.

[0699] 43. The Factor VIII polypeptide according to any one of the preceding aspects, wherein the Factor VIII amino acid sequence does not comprise amino acids corresponding to positions 739 to 740, 738 to 740, 737 to 740, 736 to 740, 735 to 740, 734 to 740, 733 to 740, 732 to 740, 731 to 740, 730 to 740, 729 to 740, 728 to 740, 727 to 740, 726 to 740, 725 to 740, or 724 to 740 of SEQ ID NO: 1.

[0700] 44. The Factor VIII polypeptide according to any one of the preceding aspects, wherein the Factor VIII amino acid sequence does not comprise amino acids corresponding to positions 738 to 740 of SEQ ID NO: 1.

[0701] 45. The Factor VIII polypeptide according to any one of the preceding aspects, wherein the Factor VIII amino acid sequence does not comprise amino acids corresponding to positions 735 to 740 of SEQ ID NO: 1.

[0702] 46. The Factor VIII polypeptide according to any one of the preceding aspects, wherein the Factor VIII amino acid sequence does not comprise amino acids corresponding to positions 732 to 740 of SEQ ID NO: 1.

[0703] 47. The Factor VIII polypeptide according to any one of the preceding aspects, wherein the Factor VIII amino acid sequence does not comprise amino acids corresponding to positions 729 to 740 of SEQ ID NO: 1.

[0704] 48. The Factor VIII polypeptide according to any one of the preceding aspects, wherein the Factor VIII amino acid sequence does not comprise amino acids corresponding to positions 726 to 740 of SEQ ID NO: 1.

[0705] 49. The Factor VIII polypeptide according to any one of the preceding aspects, wherein the Factor VIII amino acid sequence does not comprise amino acids corresponding to positions 724 to 740 of SEQ ID NO: 1.

[0706] 50. The Factor VIII polypeptide according to any one of aspects 1 to 48, wherein the Factor VIII amino acid sequence comprises at least one amino acid(s) corresponding to positions 724 to 740 of SEQ ID NO: 1.

[0707] 51. The Factor VIII polypeptide according to any one of aspects 1 to 48 or 50, wherein the Factor VIII amino acid sequence comprises at least 2, at least 3, at least 4, at least 5, at least 6, at least 7, at least 8, at least 9, at least 10, at least 11, at least 12, at least 13, at least 14, at least 15, at least 16, or 17 amino acids corresponding to positions 724 to 740 of SEQ ID NO: 1.

[0708] 52. The Factor VIII polypeptide according to any one of aspects 1 to 48 or 50 to 51, wherein the Factor VIII amino acid sequence comprises 17 or fewer, 16 or fewer, 15 or fewer, 14 or fewer, 13 or fewer, 12 or fewer, 11 or fewer, 10 or fewer, 9 or fewer, 8 or fewer, 7 or fewer, 6 or fewer, 5 or fewer, 4 or fewer, 3 or fewer, or 2 or fewer amino acids corresponding to positions 724 to 740 of SEQ ID NO: 1.

[0709] 53. The Factor VIII polypeptide according to any one of aspects 50 to 52, wherein the Factor VIII amino acid sequence comprises between 1 and 18, between 4 and 15, between 4 and 12, or between 4 and 9 amino acids corresponding to positions 724 to 740 of SEQ ID NO: 1.

[0710] 54. The Factor VIII polypeptide according to any one of aspects 50 to 53, wherein the Factor VIII amino acid sequence comprises at least 2 contiguous amino acids corresponding to positions 724 to 740 of SEQ ID NO: 1.

[0711] 55. The Factor VIII polypeptide according to any one of aspects 50 to 54, wherein the Factor VIII amino acid sequence comprises at least 3, at least 4, at least 5, at least 6, at least 7, at least 8, at least 9, at least 10, at least 11, at least 12, at least 13, at least 14, at least 15, at least 16, or 17 contiguous amino acids corresponding to positions 724 to 740 of SEQ ID NO: 1.

[0712] 56. The Factor VIII polypeptide according to any one of aspects 50 to 55, wherein the Factor VIII amino acid sequence comprises amino acids corresponding to positions 724 to 725, 724 to 726, 724 to 727, 724 to 728, 724 to 729, 724 to 730, 724 to 731, 724 to 732, 724 to 733, 724 to 734, 724 to 735, 724 to 736, 724 to 737, 724 to 738, 724 to 739, or 724 to 740 of SEQ ID NO: 1.

[0713] 57. The Factor VIII polypeptide according to any one of aspects 50 to 56, wherein the Factor VIII amino acid sequence comprises amino acids corresponding to positions 724 to 725 of SEQ ID NO: 1.

[0714] 58. The Factor VIII polypeptide according to any one of aspects 50 to 57, wherein the Factor VIII amino acid sequence comprises amino acids corresponding to positions 724 to 728 of SEQ ID NO: 1.

[0715] 59. The Factor VIII polypeptide according to any one of aspects 50 to 58, wherein the Factor VIII amino acid sequence comprises amino acids corresponding to positions 724 to 731 of SEQ ID NO: 1.

[0716] 60. The Factor VIII polypeptide according to any one of aspects 50 to 59, wherein the Factor VIII amino acid sequence comprises amino acids corresponding to positions 724 to 734 of SEQ ID NO: 1.

[0717] 61. The Factor VIII polypeptide according to any one of aspects 50 to 60, wherein the

[0718] Factor VIII amino acid sequence comprises amino acids corresponding to positions 724 to 737 of SEQ ID NO: 1.

[0719] 62. The Factor VIII polypeptide according to any one of aspects 50 to 61, wherein the Factor VIII amino acid sequence comprises amino acids corresponding to positions 724 to 740 of SEQ ID NO: 1.

[0720] 63. The Factor VIII polypeptide according to any one of the preceding aspects, wherein the Factor VIII amino acid sequence comprises at least one of the tyrosine amino acids corresponding to positions 718, 719 and 723 of SEQ ID NO: 1.

[0721] 64. The Factor VIII polypeptide according to aspect 63, wherein the Factor VIII amino acid sequence comprises the tyrosine amino acid corresponding to position 718 of SEQ ID NO: 1.

[0722] 65. The Factor VIII polypeptide according to aspect 63 or 64, wherein the Factor VIII amino acid sequence comprises the tyrosine amino acid corresponding to position 719 of SEQ ID NO: 1.

[0723] 66. The Factor VIII polypeptide according to any one of aspects 63 to 65, wherein the Factor VIII amino acid sequence comprises the tyrosine amino acid corresponding to position 723 of SEQ ID NO: 1.

[0724] 67. The Factor VIII polypeptide according to any one of aspects 63 to 66, wherein the Factor VIII amino acid sequence comprises the tyrosine amino acids corresponding to positions 718, 719 and 723 of SEQ ID NO: 1.

[0725] 68. The Factor VIII polypeptide according to any one of the preceding aspects, wherein the Factor VIII amino acid sequence comprises at least one of the amino acid(s) corresponding to positions 714 to 723 of SEQ ID NO: 1.

[0726] 69. The Factor VIII polypeptide according to any one of the preceding aspects, wherein the Factor VIII amino acid sequence comprises at least 2, at least 3, at least 4, at least 5, at least 6, at least 7, at least 8, at least 9, or 10 amino acids corresponding to positions 714 to 723 of SEQ ID NO: 1.

[0727] 70. The Factor VIII polypeptide according to any one of the preceding aspects, wherein the Factor VIII amino acid sequence comprises 10 or fewer, 9 or fewer, 8 or fewer, 7 or fewer, 6 or fewer, 5 or fewer, 4 or fewer, 3 or fewer, or 2 or fewer amino acids corresponding to positions 714 to 723 of SEQ ID NO: 1.

[0728] 71. The Factor VIII polypeptide according to any one of the preceding aspects, wherein the Factor VIII amino acid sequence comprises between 2 and 11, between 5 and 11, or between 7 and 11 amino acids corresponding to positions 714 to 723 of SEQ ID NO: 1.

[0729] 72. The Factor VIII polypeptide according to any one of the preceding aspects, wherein the Factor VIII amino acid sequence comprises at least 2 contiguous amino acids corresponding to positions 714 to 723 of SEQ ID NO: 1.

[0730] 73. The Factor VIII polypeptide according to any one of the preceding aspects, wherein the Factor VIII amino acid sequence comprises at least 3, at least 4, at least 5, at least 6, at least 7, at least 8, at least 9, or 10 contiguous amino acids corresponding to positions 714 to 723 of SEQ ID NO: 1.

[0731] 74. The Factor VIII polypeptide according to any one of the preceding aspects, wherein the Factor VIII amino acid sequence comprises amino acids corresponding to positions 714 to 715, 714 to 716, 714 to 717, 714 to 718, 714 to 719, 714 to 720, 714 to 721, 714 to 722, or 714 to 723 of SEQ ID NO: 1.

[0732] 75. The Factor VIII polypeptide according to any one of the preceding aspects, wherein the Factor VIII amino acid sequence comprises amino acids corresponding to positions 714 to 719 of SEQ ID NO: 1.

[0733] 76. The Factor VIII polypeptide according to any one of the preceding aspects, wherein the Factor VIII amino acid sequence comprises amino acids corresponding to positions 714 to 722 of SEQ ID NO: 1.

[0734] 77. The Factor VIII polypeptide according to any one of the preceding aspects, wherein the Factor VIII amino acid sequence comprises amino acids corresponding to positions 714 to 723 of SEQ ID NO: 1.

[0735] 78. The Factor VIII polypeptide according to any one of the preceding aspects, wherein the Factor VIII amino acid sequence does not comprise at least one amino acid(s) corresponding to positions 741 to 745 of SEQ ID NO: 1.

[0736] 79. The Factor VIII polypeptide according to any one of the preceding aspects, wherein the Factor VIII amino acid sequence does not comprise at least 2, at least 3, at least 4, or 5 amino acids corresponding to positions 741 to 745 of SEQ ID NO: 1.

[0737] 80. The Factor VIII polypeptide according to any one of the preceding aspects, wherein the Factor VIII amino acid sequence does not comprise 5 or fewer, 4 or fewer, 3 or fewer, or 2 or fewer amino acids corresponding to positions 741 to 745 of SEQ ID NO: 1.

[0738] 81. The Factor VIII polypeptide according to any one of the preceding aspects, wherein the Factor VIII amino acid sequence does not comprise between 1 and 6, or between 3 and 6 amino acids corresponding to positions 741 to 745 of SEQ ID NO: 1.

[0739] 82. The Factor VIII polypeptide according to any one of the preceding aspects, wherein the Factor VIII amino acid sequence does not comprise at least 2 contiguous amino acids corresponding to positions 741 to 745 of SEQ ID NO: 1.

[0740] 83. The Factor VIII polypeptide according to any one of the preceding aspects, wherein the Factor VIII amino acid sequence does not comprise at least 3, at least 4, or 5 contiguous amino acids corresponding to positions 741 to 745 of SEQ ID NO: 1.

[0741] 84. The Factor VIII polypeptide according to any one of the preceding aspects, wherein the Factor VIII amino acid sequence does not comprise amino acids corresponding to positions 744 to 745, 743 to 745, 742 to 745, or 741 to 745 of SEQ ID NO: 1.

[0742] 85. The Factor VIII polypeptide according to any one of the preceding aspects, wherein the Factor VIII amino acid sequence does not comprise amino acids corresponding to positions 741 to 745 of SEQ ID NO: 1.

[0743] 86. The Factor VIII polypeptide according to any one of the preceding aspects, wherein the Factor VIII amino acid sequence does not comprise at least one amino acid(s) corresponding to positions 1640 to 1648 of SEQ ID NO: 1.

[0744] 87. The Factor VIII polypeptide according to any one of the preceding aspects, wherein the Factor VIII amino acid sequence does not comprise at least 2, at least 3, at least 4, at least 5, at least 6, at least 7, at least 8, or 9 amino acids corresponding to positions 1640 to 1648 of SEQ ID NO: 1.

[0745] 88. The Factor VIII polypeptide according to any one of the preceding aspects, wherein the Factor VIII amino acid sequence does not comprise 9 or fewer, 8 or fewer, 7 or fewer, 6 or fewer, 5 or fewer, 4 or fewer, 3 or fewer, or 2 or fewer amino acids corresponding to positions 1640 to 1648 of SEQ ID NO: 1.

[0746] 89. The Factor VIII polypeptide according to any one of the preceding aspects, wherein the Factor VIII amino acid sequence does not comprise between 1 and 10, between 4 and 10, or between 6 and 10 amino acids corresponding to positions 1640 to 1648 of SEQ ID NO: 1.

[0747] 90. The Factor VIII polypeptide according to any one of the preceding aspects, wherein the Factor VIII amino acid sequence does not comprise at least 2 contiguous amino acids corresponding to positions 1640 to 1648 of SEQ ID NO: 1.

[0748] 91. The Factor VIII polypeptide according to any one of the preceding aspects, wherein the Factor VIII amino acid sequence does not comprise at least 3, at least 4, at least 5, at least 6, at least 7, at least 8, or 9 contiguous amino acids corresponding to positions 1640 to 1648 of SEQ ID NO: 1.

[0749] 92. The Factor VIII polypeptide according to any one of the preceding aspects, wherein the Factor VIII amino acid sequence does not comprise amino acids corresponding to positions 1640 to 1641, 1640 to 1642, 1640 to 1643, 1640 to 1644, 1640 to 1645, 1640 to 1646, 1640 to 1647, or 1640 to 1648 of SEQ ID NO: 1.

[0750] 93. The Factor VIII polypeptide according to any one of the preceding aspects, wherein the Factor VIII amino acid sequence does not comprise amino acids corresponding to positions 1640 to 1648 of SEQ ID NO: 1.

[0751] 94. The Factor VIII polypeptide according to any one of aspects 1 to 92, wherein the Factor VIII amino acid sequence comprises amino acids corresponding to positions 1645 to 1648 of SEQ ID NO: 1, preferably wherein:
[0752] the amino acid at the position corresponding to position 1645 of SEQ ID NO: 1 is arginine;
[0753] the amino acid at the position corresponding to position 1646 of SEQ ID NO: 1 is histidine;
[0754] the amino acid at the position corresponding to position 1647 of SEQ ID NO: 1 is glutamine; and
[0755] the amino acid at the position corresponding to position 1648 of SEQ ID NO: 1 is arginine.

[0756] 95. The Factor VIII polypeptide according to any one of the preceding aspects, wherein the Factor VIII amino acid sequence does not comprise at least one amino acid(s) corresponding to positions 1649 to 1669 of SEQ ID NO: 1.

[0757] 96. The Factor VIII polypeptide according to any one of the preceding aspects, wherein the Factor VIII amino acid sequence does not comprise at least 2, at least 3, at least 4, at least 5, at least 6, at least 7, at least 8, at least 9, at least 10, at least 11, at least 12, at least 13, at least 14, at least 15, at least 16, at least 17, at least 18, at least 19, at least 20, or 21 amino acids corresponding to positions 1649 to 1669 of SEQ ID NO: 1.

[0758] 97. The Factor VIII polypeptide according to any one of the preceding aspects, wherein the Factor VIII amino acid sequence does not comprise 21 or fewer, 20 or fewer, 19 or fewer, 18 or fewer, 17 or fewer, 16 or fewer, 15 or fewer, 14 or fewer, 13 or fewer, 12 or fewer, 11 or fewer, 10 or fewer, 9 or fewer, 8 or fewer, 7 or fewer, 6 or fewer, 5 or fewer, 4 or fewer, 3 or fewer, or 2 or fewer amino acids corresponding to positions 1649 to 1669 of SEQ ID NO: 1.

[0759] 98. The Factor VIII polypeptide according to any one of the preceding aspects, wherein the Factor VIII amino acid sequence does not comprise between 1 and 22, between 5 and 22, between 8 and 22, between 11 and 22, between 14 and 22, between 17 and 22, or between 19 and 22 amino acids corresponding to positions 1649 to 1669 of SEQ ID NO: 1.

[0760] 99. The Factor VIII polypeptide according to any one of the preceding aspects, wherein the Factor VIII amino acid sequence does not comprise at least 2 contiguous amino acids corresponding to positions 1649 to 1669 of SEQ ID NO: 1.

[0761] 100. The Factor VIII polypeptide according to any one of the preceding aspects, wherein the Factor VIII amino acid sequence does not comprise at least 3, at least 4, at least 5, at least 6, at least 7, at least 8, at least 9, at least 10, at least 11, at least 12, at least 13, at least 14, at least 15, at least 16, at least 17, at least 18, at least 19, at least 20, or 21 contiguous amino acids corresponding to positions 1649 to 1669 of SEQ ID NO: 1.

[0762] 101. The Factor VIII polypeptide according to any one of the preceding aspects, wherein the Factor VIII amino acid sequence does not comprise amino acids corresponding to positions 1649 to 1650, 1649 to 1651, 1649 to 1652, 1649 to 1653, 1649 to 1654, 1649 to 1655, 1649 to 1656, 1649 to 1657, 1649 to 1658, 1649 to 1659, 1649 to 1660, 1649 to 1661, 1649 to 1662, 1649 to 1663, 1649 to 1664, 1649 to 1665, 1649 to 1666, 1649 to 1667, 1649 to 1668, or 1649 to 1669 of SEQ ID NO: 1.

[0763] 102. The Factor VIII polypeptide according to any one of the preceding aspects, wherein the Factor VIII amino acid sequence does not comprise amino acids corresponding to positions 1649 to 1651 of SEQ ID NO: 1.

[0764] 103. The Factor VIII polypeptide according to any one of the preceding aspects, wherein the Factor VIII amino acid sequence does not comprise amino acids corresponding to positions 1649 to 1654 of SEQ ID NO: 1.

[0765] 104. The Factor VIII polypeptide according to any one of the preceding aspects, wherein the Factor VIII amino acid sequence does not comprise amino acids corresponding to positions 1649 to 1657 of SEQ ID NO: 1.

[0766] 105. The Factor VIII polypeptide according to any one of the preceding aspects, wherein the Factor VIII amino acid sequence does not comprise amino acids corresponding to positions 1649 to 1660 of SEQ ID NO: 1.

[0767] 106. The Factor VIII polypeptide according to any one of the preceding aspects, wherein the Factor VIII amino acid sequence does not comprise amino acids corresponding to positions 1649 to 1663 of SEQ ID NO: 1.

[0768] 107. The Factor VIII polypeptide according to any one of the preceding aspects, wherein the Factor VIII amino acid sequence does not comprise amino acids corresponding to positions 1649 to 1664 of SEQ ID NO: 1.

[0769] 108. The Factor VIII polypeptide according to any one of the preceding aspects, wherein the Factor VIII amino acid sequence does not comprise amino acids corresponding to positions 1649 to 1666 of SEQ ID NO: 1.

[0770] 109. The Factor VIII polypeptide according to any one of the preceding aspects, wherein the Factor VIII amino acid sequence does not comprise amino acids corresponding to positions 1649 to 1667 of SEQ ID NO: 1.

[0771] 110. The Factor VIII polypeptide according to any one of the preceding aspects, wherein the Factor VIII amino acid sequence does not comprise amino acids corresponding to positions 1649 to 1669 of SEQ ID NO: 1.

[0772] 111. The Factor VIII polypeptide according to any one of aspects 1 to 109, wherein the Factor VIII amino acid sequence comprises at least one of the amino acid(s) corresponding to positions 1649 to 1669 of SEQ ID NO: 1.

[0773] 112. The Factor VIII polypeptide according to aspect 111, wherein the Factor VIII amino acid sequence comprises at least 2, at least 3, at least 4, at least 5, at least 6, at least 7, at least 8, at least 9, at least 10, at least 11, at least 12, at least 13, at least 14, at least 15, at least 16, at least 17, at least 18, at least 19, at least 20, or 21 amino acids corresponding to positions 1649 to 1669 of SEQ ID NO: 1.

[0774] 113. The Factor VIII polypeptide according to aspect 111 or 112, wherein the Factor VIII amino acid sequence comprises 21 or fewer, 20 or fewer, 19 or fewer, 18 or fewer, 17 or fewer, 16 or fewer, 15 or fewer, 14 or fewer, 13 or fewer, 12 or fewer, 11 or fewer, 10 or fewer, 9 or fewer, 8 or fewer, 7 or fewer, 6 or fewer, 5 or fewer, 4 or fewer, 3 or fewer, or 2 or fewer amino acids corresponding to positions 1649 to 1669 of SEQ ID NO: 1.

[0775] 114. The Factor VIII polypeptide according to any one of aspects 111 to 113, wherein the Factor VIII amino acid sequence comprises between 1 and 22, between 1 and 19, between 1 and 16, between 1 and 12, between 1 and 9, between 1 and 6, or between 1 and 4 amino acids corresponding to positions 1649 to 1669 of SEQ ID NO: 1.

[0776] 115. The Factor VIII polypeptide according to any one of aspects 111 to 114, wherein the Factor VIII amino acid sequence comprises at least 2 contiguous amino acids corresponding to positions 1649 to 1669 of SEQ ID NO: 1.

[0777] 116. The Factor VIII polypeptide according to any one of aspects 111 to 115, wherein the Factor VIII amino acid sequence comprises at least 3, at least 4, at least 5, at least 6, at least 7, at least 8, at least 9, at least 10, at least 11, at least 12, at least 13, at least 14, at least 15, at least 16, at least 17, at least 18, at least 19, at least 20, or 21 contiguous amino acids corresponding to positions 1649 to 1669 of SEQ ID NO: 1.

[0778] 117. The Factor VIII polypeptide according to any one of aspects 111 to 116, wherein the Factor VIII amino acid sequence comprises amino acids corresponding to positions 1668 to 1669, 1667 to 1669, 1666 to 1669, 1665 to 1669, 1664 to 1669, 1663 to 1669, 1662 to 1669, 1661 to 1669, 1660 to 1669, 1659 to 1669, 1658 to 1669, 1657 to 1669, 1656 to 1669, 1655 to 1669, 1654 to 1669, 1653 to 1669, 1652 to 1669, 1651 to 1669, 1650 to 1669, or 1649 to 1669 of SEQ ID NO: 1.

[0779] 118. The Factor VIII polypeptide according to any one of aspects 111 to 117, wherein the Factor VIII amino acid sequence comprises an amino acid corresponding to position 1664 of SEQ ID NO: 1, preferably wherein the amino acid is a tyrosine.

[0780] 119. The Factor VIII polypeptide according to any one of aspects 111 to 118, wherein the Factor VIII amino acid sequence comprises amino acids corresponding to positions 1668 and/or 1669 of SEQ ID NO: 1.

[0781] 120. The Factor VIII polypeptide according to any one of aspects 111 to 119, wherein the Factor VIII amino acid sequence comprises amino acids corresponding to positions 1668 to 1669 of SEQ ID NO: 1.

[0782] 121. The Factor VIII polypeptide according to any one of aspects 111 to 120, wherein the Factor VIII amino acid sequence comprises amino acids corresponding to positions 1667 to 1669 of SEQ ID NO: 1.

[0783] 122. The Factor VIII polypeptide according to any one of aspects 111 to 121, wherein the Factor VIII amino acid sequence comprises amino acids corresponding to positions 1664 to 1669 of SEQ ID NO: 1.

[0784] 123. The Factor VIII polypeptide according to any one of aspects 111 to 122, wherein the Factor VIII amino acid sequence comprises amino acids corresponding to positions 1661 to 1669 of SEQ ID NO: 1.

[0785] 124. The Factor VIII polypeptide according to any one of aspects 111 to 123, wherein the Factor VIII amino acid sequence comprises amino acids corresponding to positions 1658 to 1669 of SEQ ID NO: 1.

[0786] 125. The Factor VIII polypeptide according to any one of aspects 111 to 124, wherein the Factor VIII amino acid sequence comprises amino acids corresponding to positions 1655 to 1669 of SEQ ID NO: 1.

[0787] 126. The Factor VIII polypeptide according to any one of aspects 111 to 125, wherein the Factor VIII amino acid sequence comprises amino acids corresponding to positions 1652 to 1669 of SEQ ID NO: 1.

[0788] 127. The Factor VIII polypeptide according to any one of aspects 111 to 126, wherein the Factor VIII amino acid sequence comprises amino acids corresponding to positions 1649 to 1669 of SEQ ID NO: 1.

[0789] 128. The Factor VIII polypeptide according to any one of the preceding aspects, wherein the Factor VIII amino acid sequence comprises at least one amino acid(s) corresponding to positions 1670 to 1678 of SEQ ID NO: 1.

[0790] 129. The Factor VIII polypeptide according to any one of the preceding aspects, wherein the Factor VIII amino acid sequence comprises at least 2, at least 3, at least 4, at least 5, at least 6, at least 7, at least 8, or 9 amino acids corresponding to positions 1670 to 1678 of SEQ ID NO: 1.

[0791] 130. The Factor VIII polypeptide according to any one of the preceding aspects, wherein the Factor VIII amino acid sequence comprises 9 or fewer, 8 or fewer, 7 or fewer, 6 or fewer, 5 or fewer, 4 or fewer, 3 or fewer, or 2 or fewer amino acids corresponding to positions 1670 to 1678 of SEQ ID NO: 1.

[0792] 131. The Factor VIII polypeptide according to any one of the preceding aspects, wherein the Factor VIII amino acid sequence comprises between 1 and 10, between 4 and 10, or between 7 and 10 amino acids corresponding to positions 1670 to 1678 of SEQ ID NO: 1.

[0793] 132. The Factor VIII polypeptide according to any one of the preceding aspects, wherein the Factor VIII amino acid sequence comprises at least 2 contiguous amino acids corresponding to positions 1670 to 1678 of SEQ ID NO: 1.

[0794] 133. The Factor VIII polypeptide according to any one of the preceding aspects, wherein the Factor VIII amino acid sequence comprises at least 3, at least 4, at least 5, at least 6, at least 7, at least 8, or 9 contiguous amino acids corresponding to positions 1670 to 1678 of SEQ ID NO: 1.

[0795] 134. The Factor VIII polypeptide according to any one of the preceding aspects, wherein the Factor VIII amino acid sequence comprises amino acids corresponding to positions 1670 to 1678 of SEQ ID NO: 1.

[0796] 135. The Factor VIII polypeptide according to any one of the preceding aspects, wherein the Factor VIII polypeptide can bind to a von Willebrand factor.

[0797] 136. The Factor VIII polypeptide according to any one of the preceding aspects, wherein the Factor VIII amino acid sequence comprises a von Willebrand factor binding site.

[0798] 137. The Factor VIII polypeptide according to aspect 135 or 136, wherein the ability of the Factor VIII polypeptide to bind to a von Willebrand factor is measured by ELISA or wherein the Factor VIII amino acid sequence comprises a von Willebrand factor binding site if it can bind to a von Willebrand factor as measured by an ELISA.

[0799] 138. The Factor VIII polypeptide according to any one of the preceding aspects, wherein the Factor VIII amino acid sequence comprises an amino acid corresponding to position 1679 of SEQ ID NO: 1.

[0800] 139. The Factor VIII polypeptide according to any one of the preceding aspects, wherein the Factor VIII amino acid sequence comprises an amino acid corresponding to position 1680 of SEQ ID NO: 1, preferably wherein the amino acid is a tyrosine.

[0801] 140. The Factor VIII polypeptide according to any one of the preceding aspects, wherein the Factor VIII amino acid sequence comprises amino acids corresponding to positions 1679 and 1680 of SEQ ID NO: 1, preferably wherein the amino acid corresponding to position 1680 is a tyrosine.

[0802] 141. The Factor VIII polypeptide according to any one of aspects 1 to 137 or 139, wherein the Factor VIII amino acid sequence does not comprise an amino acid corresponding to position 1679 of SEQ ID NO: 1.

[0803] 142. The Factor VIII polypeptide according to any one of aspects 1 to 138 or 141, wherein the Factor VIII amino acid sequence does not comprise an amino acid corresponding to position 1680 of SEQ ID NO: 1.

[0804] 143. The Factor VIII polypeptide according to aspect 141 or 142, wherein the Factor VIII amino acid sequence does not comprise amino acids corresponding to positions 1679 and 1680 of SEQ ID NO: 1.

[0805] 144. The Factor VIII polypeptide according to any one of the preceding aspects, wherein the Factor VIII amino acid sequence does not comprise at least one amino acid(s) corresponding to positions 1681 to 1689 of SEQ ID NO: 1.

[0806] 145. The Factor VIII polypeptide according to any one of the preceding aspects, wherein the Factor VIII amino acid sequence does not comprise at least 2, at least 3, at least 4, at least 5, at least 6, at least 7, at least 8, or 9 amino acids corresponding to positions 1681 to 1689 of SEQ ID NO: 1.

[0807] 146. The Factor VIII polypeptide according to any one of the preceding aspects, wherein the Factor VIII amino acid sequence does not comprise 9 or fewer, 8 or fewer, 7 or fewer, 6 or fewer, 5 or fewer, 4 or fewer, 3 or fewer, or 2 or fewer amino acids corresponding to positions 1681 to 1689 of SEQ ID NO: 1.

[0808] 147. The Factor VIII polypeptide according to any one of the preceding aspects, wherein the Factor VIII amino acid sequence does not comprise between 1 and 10, between 4 and 10, or between 6 and 10 amino acids corresponding to positions 1681 to 1689 of SEQ ID NO: 1.

[0809] 148. The Factor VIII polypeptide according to any one of the preceding aspects, wherein the Factor VIII amino acid sequence does not comprise at least 2 contiguous amino acids corresponding to positions 1681 to 1689 of SEQ ID NO: 1.

[0810] 149. The Factor VIII polypeptide according to any one of the preceding aspects, wherein the Factor VIII amino acid sequence does not comprise at least 3, at least 4, at least 5, at least 6, at least 7, at least 8, or 9 contiguous amino acids corresponding to positions 1681 to 1689 of SEQ ID NO: 1.

[0811] 150. The Factor VIII polypeptide according to any one of the preceding aspects, wherein the Factor VIII amino acid sequence does not comprise amino acids corresponding to positions 1681 to 1682, 1681 to 1683, 1681 to 1684, 1681 to 1685, 1681 to 1686, 1681 to 1687, 1681 to 1688, or 1681 to 1689 of SEQ ID NO: 1.

[0812] 151. The Factor VIII polypeptide according to any one of the preceding aspects, wherein the Factor VIII amino acid sequence does not comprise amino acids corresponding to positions 1681 to 1683 of SEQ ID NO: 1.

[0813] 152. The Factor VIII polypeptide according to any one of the preceding aspects, wherein the Factor VIII amino acid sequence does not comprise amino acids corresponding to positions 1681 to 1686 of SEQ ID NO: 1.

[0814] 153. The Factor VIII polypeptide according to any one of the preceding aspects, wherein the Factor VIII amino acid sequence does not comprise amino acids corresponding to positions 1681 to 1688 of SEQ ID NO: 1.

[0815] 154. The Factor VIII polypeptide according to any one of the preceding aspects, wherein the Factor VIII amino acid sequence does not comprise amino acids corresponding to positions 1681 to 1689 of SEQ ID NO: 1.

[0816] 155. The Factor VIII polypeptide according to any one of aspects 1 to 153, wherein the Factor VIII amino acid sequence comprises at least one of the amino acid(s) corresponding to positions 1681 to 1689 of SEQ ID NO: 1.

[0817] 156. The Factor VIII polypeptide according to aspect 155, wherein the Factor VIII amino acid sequence comprises at least 2, at least 3, at least 4, at least 5, at least 6, at least 7, at least 8, or 9 amino acids corresponding to positions 1681 to 1689 of SEQ ID NO: 1.

[0818] 157. The Factor VIII polypeptide according to aspect 155 or 156, wherein the Factor VIII amino acid sequence comprises 9 or fewer, 8 or fewer, 7 or fewer, 6 or fewer, 5 or fewer, 4 or fewer, 3 or fewer, or 2 or fewer amino acids corresponding to positions 1681 to 1689 of SEQ ID NO: 1.

[0819] 158. The Factor VIII polypeptide according to any one of aspects 155 to 157, wherein the Factor VIII amino acid sequence comprises between 1 and 10, between 4 and 10, or between 6 and 10 amino acids corresponding to positions 1681 to 1689 of SEQ ID NO: 1.

[0820] 159. The Factor VIII polypeptide according to any one of aspects 155 to 158, wherein the Factor VIII amino acid sequence comprises at least 2 contiguous amino acids corresponding to positions 1681 to 1689 of SEQ ID NO: 1.

[0821] 160. The Factor VIII polypeptide according to any one of aspects 155 to 159, wherein the Factor VIII amino acid sequence comprises at least 3, at least 4, at least 5, at least 6, at least 7, at least 8, or 9 contiguous amino acids corresponding to positions 1681 to 1689 of SEQ ID NO: 1.

[0822] 161. The Factor VIII polypeptide according to any one of aspects 155 to 160, wherein the Factor VIII amino acid sequence comprises amino acids corresponding to positions 1688 to 1689, 1687 to 1689, 1686 to 1689, 1685 to 1689, 1684 to 1689, 1683 to 1689, 1682 to 1689, or 1681 to 1689 of SEQ ID NO: 1.

[0823] 162. The Factor VIII polypeptide according to any one of aspects 155 to 161, wherein the Factor VIII amino acid sequence comprises an amino acid corresponding to position 1689 of SEQ ID NO: 1.

[0824] 163. The Factor VIII polypeptide according to any one of aspects 155 to 162, wherein the Factor VIII amino acid sequence comprises amino acids corresponding to positions 1687 to 1689 of SEQ ID NO: 1.

[0825] 164. The Factor VIII polypeptide according to any one of aspects 155 to 163, wherein the Factor VIII amino acid sequence comprises amino acids corresponding to positions 1684 to 1689 of SEQ ID NO: 1.

[0826] 165. The Factor VIII polypeptide according to any one of aspects 155 to 164, wherein the Factor VIII amino acid sequence comprises amino acids corresponding to positions 1681 to 1689 of SEQ ID NO: 1.

[0827] 166. The Factor VIII polypeptide according to any one of the preceding aspects, wherein the Factor VIII amino acid sequence comprises at least one of the amino acid(s) corresponding to positions 1690 to 1696 of SEQ ID NO: 1.

[0828] 167. The Factor VIII polypeptide according to any one of the preceding aspects, wherein the Factor VIII amino acid sequence comprises at least 2, at least 3, at least 4, at least 5, at least 6, or 7 amino acids corresponding to positions 1690 to 1696 of SEQ ID NO: 1.

[0829] 168. The Factor VIII polypeptide according to any one of the preceding aspects, wherein the Factor VIII amino acid sequence comprises 7 or fewer, 6 or fewer, 5 or fewer, 4 or fewer, 3 or fewer, or 2 or fewer amino acids corresponding to positions 1690 to 1696 of SEQ ID NO: 1.

[0830] 169. The Factor VIII polypeptide according to any one of the preceding aspects, wherein the Factor VIII amino acid sequence comprises between 2 and 8, or between 5 and 8 amino acids corresponding to positions 1690 to 1696 of SEQ ID NO: 1.

[0831] 170. The Factor VIII polypeptide according to any one of the preceding aspects, wherein the Factor VIII amino acid sequence comprises at least 2 contiguous amino acids corresponding to positions 1690 to 1696 of SEQ ID NO: 1.

[0832] 171. The Factor VIII polypeptide according to any one of the preceding aspects, wherein the Factor VIII amino acid sequence comprises at least 3, at least 4, at least 5, at least 6, or 7 contiguous amino acids corresponding to positions 1690 to 1696 of SEQ ID NO: 1.

[0833] 172. The Factor VIII polypeptide according to any one of the preceding aspects, wherein the Factor VIII amino acid sequence comprises amino acids corresponding to positions 1695 to 1696, 1694 to 1696, 1693 to 1696, 1692 to 1696, 1691 to 1696, or 1690 to 1696 of SEQ ID NO: 1.

[0834] 173. The Factor VIII polypeptide according to any one of the preceding aspects, wherein the Factor VIII amino acid sequence comprises amino acids corresponding to positions 1690 to 1696 of SEQ ID NO: 1.

[0835] 174. The Factor VIII polypeptide according to any one of aspects 1 to 35, 37 to 94, 95 to 110 or 128 to 173, wherein the Factor VIII amino acid sequence does not comprise amino acids corresponding to positions 741 to 1669 of SEQ ID NO: 1.

[0836] 175. The Factor VIII polypeptide according to aspect 174, wherein the Factor VIII amino acid sequence does not comprise amino acids corresponding to positions 741 to 1669 of SEQ ID NO: 1, and the Factor VIII amino acid sequence comprises amino acids corresponding to positions 724 to 740 of SEQ ID NO: 1.

[0837] 176. The Factor VIII polypeptide according to aspect 174 or 175, wherein the Factor VIII amino acid sequence does not comprise amino acids corresponding to positions 741 to 1669 of SEQ ID NO: 1, and the Factor VIII amino acid sequence comprises amino acids corresponding to positions 1670 to 1689 of SEQ ID NO: 1.

[0838] 177. The Factor VIII polypeptide according to any one of aspects 174 to 176, wherein the Factor VIII amino acid sequence does not comprise amino acids corresponding to positions 741 to 1669 of SEQ ID NO: 1, and the Factor VIII amino acid sequence comprises amino acids corresponding to positions 724 to 740 and 1670 to 1689 of SEQ ID NO: 1.

[0839] 178. The Factor VIII polypeptide according to any one of aspects 174 to 177, wherein the Factor VIII amino acid sequence does not comprise amino acids corresponding to positions 741 to 1669 of SEQ ID NO: 1, and the Factor VIII amino acid sequence comprises amino acids corresponding to positions 724 to 740 and 1670 to 1689 of SEQ ID NO: 1 and the tyrosine amino acids corresponding to positions 718, 719 and 723 of SEQ ID NO: 1.

[0840] 179. The Factor VIII polypeptide according to any one of aspects 174 to 178, wherein the Factor VIII amino acid sequence does not comprise amino acids corresponding to positions 741 to 1669 of SEQ ID NO: 1, and the Factor VIII amino acid sequence comprises amino acids corresponding to positions 714 to 740 and 1670 to 1689 of SEQ ID NO: 1.

[0841] 180. The Factor VIII polypeptide according to any one of aspects 174 to 179, wherein the Factor VIII amino acid sequence does not comprise amino acids corresponding to positions 741 to 1669 of SEQ ID NO: 1, and the Factor VIII amino acid sequence comprises amino acids corresponding to positions 1 to 740 and 1670 to 2332 of SEQ ID NO: 1.

[0842] 181. The Factor VIII polypeptide according to aspect 180, wherein the Factor VIII amino acid sequence comprises SEQ ID NO: 9.

[0843] 182. The Factor VIII polypeptide according to any one of aspects 1 to 35, 59 to 109, or 128 to 180, wherein the Factor VIII amino acid sequence does not comprise amino acids corresponding to positions 732 to 1669 of SEQ ID NO: 1.

[0844] 183. The Factor VIII polypeptide according to aspect 182, wherein the Factor VIII amino acid sequence does not comprise amino acids corresponding to positions 732 to 1669 of SEQ ID NO: 1, and the Factor VIII amino acid sequence comprises amino acids corresponding to positions 724 to 731 of SEQ ID NO: 1.

[0845] 184. The Factor VIII polypeptide according to aspect 182 or 183, wherein the Factor VIII amino acid sequence does not comprise amino acids corresponding to positions 732 to 1669 of SEQ ID NO: 1, and the Factor VIII amino acid sequence comprises amino acids corresponding to positions 1670 to 1689 of SEQ ID NO: 1.

[0846] 185. The Factor VIII polypeptide according to any one of aspects 182 to 184, wherein the Factor VIII amino acid sequence does not comprise amino acids corresponding to positions 732 to 1669 of SEQ ID NO: 1, and the Factor VIII amino acid sequence comprises amino acids corresponding to positions 724 to 731 and 1670 to 1689 of SEQ ID NO: 1.

[0847] 186. The Factor VIII polypeptide according to any one of aspects 182 to 185, wherein the Factor VIII amino acid sequence does not comprise amino acids corresponding to positions 732 to 1669 of SEQ ID NO: 1, and the Factor VIII amino acid sequence comprises amino acids corresponding to positions 724 to 731 and 1670 to 1689 of SEQ ID NO: 1 and the tyrosine amino acids corresponding to positions 718, 719 and 723 of SEQ ID NO: 1.

[0848] 187. The Factor VIII polypeptide according to any one of aspects 182 to 186, wherein the Factor VIII amino acid sequence does not comprise amino acids corresponding to positions 732 to 1669 of SEQ ID NO: 1, and the Factor VIII amino acid sequence comprises amino acids corresponding to positions 714 to 731 and 1670 to 1689 of SEQ ID NO: 1.

[0849] 188. The Factor VIII polypeptide according to any one of aspects 182 to 187, wherein the Factor VIII amino acid sequence does not comprise amino acids corresponding to positions 732 to 1669 of SEQ ID NO: 1, and the Factor VIII amino acid sequence comprises amino acids corresponding to positions 1 to 731 and 1670 to 2332 of SEQ ID NO: 1.

[0850] 189. The Factor VIII polypeptide according to any one of aspects 182 to 188, wherein the Factor VIII amino acid sequence comprises SEQ ID NO: 31.

[0851] 190. The Factor VIII polypeptide according to any one of the preceding aspects, wherein the Factor VIII amino acid sequence comprises any one of SEQ ID NOs: 9-36.

[0852] 191. The Factor VIII polypeptide according to any one of aspects 1 to 190, wherein the Factor VIII amino acid sequence comprises one or more substitution mutations at an inter-domain interface selected from the group consisting of:
[0853] a. the A1/A3 domain interface;
[0854] b. the A2/A3 domain interface; or
[0855] c. the A1/C2 domain interface,
   wherein:
[0856] (i) the one or more substitution mutations comprises substitution of an amino acid with a more hydrophobic amino acid; or
[0857] (ii) the one or more substitution mutations comprises substitution of a pair of amino acids in the respective domains with cysteine residues;
   and wherein the Factor VIII polypeptide has higher specific activity than a reference wild-type Factor VIII polypeptide.

[0858] 192. The Factor VIII polypeptide according to any one of aspects 1 to 190, wherein the Factor VIII amino acid sequence comprises one or more substitution mutations at an inter-domain interface selected from the group consisting of:
[0859] a. the A1/A3 domain interface;
[0860] b. the A2/A3 domain interface; or
[0861] c. the A1/C2 domain interface
   wherein:
[0862] (i) the one or more substitution mutations comprises substitution of an amino acid with a more hydrophobic amino acid; or
[0863] (ii) the one or more substitution mutations comprises substitution of a pair of amino acids in respective domains with cysteine residues;
   and wherein the Factor VIII polypeptide has higher stability than a reference wild-type Factor VIII polypeptide.

[0864] 193. The Factor VIII polypeptide according to any one aspects 1 to 190, wherein the Factor VIII amino acid sequence comprises one or more substitution mutations at an inter-domain interface selected from the group consisting of:
[0865] a. the A1/A3 domain interface;
[0866] b. the A2/A3 domain interface; or
[0867] c. the A1/C2 domain interface
   wherein:
[0868] (i) the one or more substitution mutations comprises substitution of an amino acid with a more hydrophobic amino acid; or
[0869] (ii) the one or more substitution mutations comprises substitution of a pair of amino acids in respective domains with cysteine residues;
   and wherein the Factor VIII polypeptide is expressed at a higher level in a host cell than a reference wild-type Factor VIII polypeptide.

[0870] 194. The Factor VIII polypeptide according to any one of aspects 1 to 190, wherein the Factor VIII amino acid sequence comprises a one or more substitution mutations selected from the group consisting of:
[0871] a. a substitution of an amino acid corresponding to M662 or H693 of SEQ ID NO: 1; or
[0872] b. a substitution of a pair of amino acids comprising a first amino acid and a second amino acid with cysteine residues, wherein:
   [0873] 1. the first amino acid corresponds to M147, S149 or S289 of SEQ ID NO: 1 and the second amino acid corresponds to E1969, E1970 or N1977 of SEQ ID NO: 1;
   [0874] 2. the first amino acid corresponds to T667, T669, N684, L687, I689, S695 or F697 of SEQ ID NO: 1 and the second amino acid corresponds to S1791, G1799, A1800, R1803, E1844, S1949, G1981, V1982, or Y1979 of SEQ ID NO: 1; or
   [0875] 3. the first amino acid corresponds to A108, T118 or V137 of SEQ ID NO: 1 and the second amino acid corresponds to N2172, Q2329 or Y2332 of SEQ ID NO: 1.

[0876] 195. The Factor VIII polypeptide according to any one of aspects 191 to 194, wherein the Factor VIII polypeptide has higher specific activity relative to a reference wild-type Factor VIII polypeptide.

[0877] 196. The Factor VIII polypeptide according to aspect 191 or 195, wherein the Factor VIII polypeptide has a specific activity which is at least 1.1 fold, at least 1.2 fold, at least 1.5 fold, at least 1.7 fold, at least 1.8 fold, at least 2 fold, at least 2.2 fold, at least 2.5 fold, at least 3 fold, at least 3.5 fold, at least 4 fold, at least 4.5 fold, at least 5 fold, or at least 5.5 fold higher than the specific activity of the reference Factor VIII polypeptide.

[0878] 197. The Factor VIII polypeptide according to any one of aspects 191 or 193 to 196, wherein the Factor VIII polypeptide has higher stability relative to a reference wild-type Factor VIII polypeptide.

[0879] 198. The Factor VIII polypeptide according to aspect 192 or 197, wherein the Factor VIII polypeptide has a longer half-life relative to the reference wild-type Factor VIII polypeptide, optionally wherein the Factor VIII polypeptide has a longer half-life relative to the reference wild-type Factor VIII polypeptide when activated.

[0880] 199. The Factor VIII polypeptide according to aspect 198, wherein the Factor VIII polypeptide has a longer half-life which is at least 1.1, at least 1.2, at least 1.5, at least 1.7, at least 1.8, at least 2, at least 2.2, at least 2.5, at least 2.8 or at least 3 times the half-life of a reference wild-type Factor VIII polypeptide, and/or wherein the Factor VIII polypeptide has a half-life when activated which is at least 1.1, at least 1.2, at least 1.5, at least 1.7, at least 1.8, at least 2, at least 2.2, at least 2.5, at least 2.8 or at least 3 times the half-life of a reference wild-type Factor VIII polypeptide when activated.

[0881] 200. The Factor VIII polypeptide according to aspect 198 or 199, wherein the longer half-life is longer half-life in plasma.

[0882] 201. The Factor VIII polypeptide according to aspect 191, 192 or 194 to 196, wherein the Factor VIII polypeptide is expressed at a higher level in a host cell than a reference wild-type Factor VIII polypeptide.

[0883] 202. The Factor VIII polypeptide according to aspect 201, wherein the level of Factor VIII polypeptide that is expressed is the level of FVIII polypeptide secreted by a host cell.

[0884] 203. The Factor VIII polypeptide according to aspect 201 or 202, wherein the host cell is a human liver cell.

[0885] 204. The Factor VIII polypeptide according to aspect 203, wherein the human liver cell is an Huh7 cell.

[0886] 205. The Factor VIII polypeptide according to aspect 201, wherein the level of Factor VIII polypeptide that is expressed is in vivo expression.

[0887] 206. The Factor VIII polypeptide according to any one of aspects 191 to 205, wherein the Factor VIII polypeptide has higher specific activity and/or higher stability and/or is expressed at a higher level in a host cell than a reference Factor VIII polypeptide which comprises the Factor VIII amino acid sequence of the Factor VIII polypeptide but which does not comprise the one or more substitution mutations.

[0888] 207. The Factor VIII polypeptide according to aspect 206, wherein the reference Factor VIII polypeptide is the Factor VIII polypeptide of SEQ ID NO: 1, 3 or 5.

[0889] 208. The Factor VIII polypeptide according to any one of aspects 191 to 207, wherein the one or more substitution mutations at the inter-domain interface stabilise the interaction of the respective domains of the Factor VIII polypeptide when activated.

[0890] 209. The Factor VIII polypeptide according to aspect 208, wherein at least one of the one or more acid substitution mutations increases pi-stacking interactions between amino acid side chains of the respective domains.

[0891] 210. The Factor VIII polypeptide according to aspect 208 or 209, wherein at least one of the one or more substitution mutations increases hydrophobic packing between the amino acid side-chains of the respective domains.

[0892] 211. The Factor VIII polypeptide according to any one of aspects 208 to 210, wherein at least one of the one or more substitution mutations reduces steric clashing and/or unfavourable electrostatic interactions between amino acid side chains of the respective domains.

[0893] 212. The Factor VIII polypeptide according to any one of aspects 191 to 193 or 195 to 211, wherein the one or more substitution mutations comprise a substitution of one or more surface-inaccessible amino acids at an inter-domain interface.

[0894] 213. The Factor VIII polypeptide according to any one of aspects 191 to 193 or 195 to 212, wherein the amino acid substituted with a more hydrophobic amino acid is methionine or histidine.

[0895] 214. The Factor VIII polypeptide according to any one of aspects 191 to 193 or 195 to 213, wherein the amino acid substituted with a more hydrophobic amino acid is methionine corresponding to the amino acid at position 662 of SEQ ID NO: 1 or histidine corresponding to the amino acid at position 693 of SEQ ID NO: 1.

[0896] 215. The Factor VIII polypeptide according to any one of aspects 191 to 214, wherein the one or more substitution mutation does not comprise the M662C substitution.

[0897] 216. The Factor VIII polypeptide according to any one of aspects 191 to 215, wherein:
[0898] a. the one or more substitution mutations comprises substitution of methionine with tyrosine, isoleucine, leucine, phenylalanine or tryptophan;
[0899] b. the one or more substitution mutations comprises substitution of histidine with glutamate, cysteine, valine, methionine, tyrosine, isoleucine, leucine, phenylalanine or tryptophan.

[0900] 217. The Factor VIII polypeptide according to any one of aspects 191 to 216, wherein the one or more substitution mutations comprises substitution of an amino acid with an aromatic amino acid.

[0901] 218. The Factor VIII polypeptide according to any one of aspects 191 to 217, wherein the one or more substitution mutations comprises the M662W substitution.

[0902] 219. The Factor VIII polypeptide according to any one of aspects 191 to 218, wherein the one or more substitution mutations comprises the H693W substitution.

[0903] 220. The Factor VIII polypeptide according to any one of aspects 191 to 219, wherein the one or more substitution mutations comprises the M662W and H693W substitutions.

[0904] 221. The Factor VIII polypeptide according to any one of aspects 191 to 220, wherein the one or more substitution mutations comprises substitution of a pair of amino acids in the respective domains with cysteine residues, wherein the cysteine residues form a disulphide bond between the respective domains.

[0905] 222. The Factor VIII polypeptide according to aspect 221, wherein the pair of amino acids are in the A1 and A3 domains.

[0906] 223. The Factor VIII polypeptide according to aspect 221 or 222, wherein the pair of amino acids comprises a first amino acid and a second amino acid, wherein the first amino acid corresponds to M147, S149 or S289 of SEQ ID NO: 1 and the second amino acid corresponds to E1969, E1970 or N1977 of SEQ ID NO: 1.

[0907] 224. The Factor VIII polypeptide according to any one of aspects 221 to 223, wherein the one or more substitution mutations comprises a pair of substitution mutations selected from the list consisting of (i) S289C and N1977C, (ii) M147C and E1970C, and (iii) S149C and E1969C.

[0908] 225. The Factor VIII polypeptide according to aspect 221, wherein the pair of amino acids are in the A2 and A3 domains.

[0909] 226. The Factor VIII polypeptide according to aspect 221 or 225, wherein the pair of amino acids comprises a first amino acid and a second amino acid, wherein the first amino acid corresponds to T667, T669, N684, L687, 1689, S695 or F697 of SEQ ID NO: 1 and the second amino acid corresponds to S1791, G1799, A1800, R1803, E1844, S1949, G1981, V1982, or Y1979 of SEQ ID NO: 1.

[0910] 227. The Factor VIII polypeptide according to any one of aspects 221, 225 or 226, wherein the one or more substitution mutations comprises a pair of substitution mutations selected from the list consisting of (i) T669C and V1982C, (ii) L687C and A1800C, (iii) I689C and G1799C, (iv) F697C and 51949C, (v) T667C and G1981C, (vi) T669C and Y1979C, (vii) N684C and 51791C, (viii) L687C and R1803C, and (ix) S695C and E1844C.

[0911] 228. The Factor VIII polypeptide according to aspect 221, wherein the pair of amino acids are in the A1 and C2 domains.

[0912] 229. The Factor VIII polypeptide according to aspect 221 or 228, wherein the pair of amino acids comprises a first amino acid and a second amino acid, wherein the first amino acid corresponds to A108, T118 or V137 of SEQ ID NO: 1 and the second amino acid corresponds to N2172, Q2329 or Y2332 of SEQ ID NO: 1.

[0913] 230. The Factor VIII polypeptide according to any one of aspects 221, 228 or 229, wherein the one or more substitution mutations comprises a pair of substitution mutations selected from the list consisting of (i) A108C and Q2329C, (ii) T118C and N2172C, and (iii) V137C and Y2332C.

[0914] 231. The Factor VIII polypeptide according to any one of aspects 191 to 230, wherein the one or more substitution mutations do not inhibit activation of the Factor VIII polypeptide.

[0915] 232. The Factor VIII polypeptide according to any one of aspects 1 to 231, wherein the Factor VIII amino acid sequence comprises the amino acid sequence set forth in SEQ ID NO: 77 , or an amino acid sequence that is at least 90%, at least 95%, at least 96%, at least 97%, at least 98%, at least 99% or 100% identical to the amino acid sequence set forth in SEQ ID NO: 77.

[0916] 233. A polynucleotide comprising a Factor VIII nucleotide sequence, wherein the Factor VIII nucleotide sequence encodes a Factor VIII polypeptide and wherein at least a portion of the Factor VIII nucleotide sequence is not wild-type.

[0917] 234. The polynucleotide of aspect 233, wherein the Factor VIII polypeptide comprises a Factor VIII amino acid sequence.

[0918] 235. The polynucleotide according to aspect 233 or 234, wherein the Factor VIII nucleotide sequence encodes the Factor VIII polypeptide according to any one of aspects 1 to 232.

[0919] 236. The polynucleotide of any one of aspects 233 to 235, wherein the Factor VIII polypeptide comprises a Factor VIII amino acid sequence and wherein the Factor VIII amino acid sequence comprises a modified beta domain related (BDR) region which is modified relative to wild-type BDR region, which wild-type BDR region corresponds to the region between positions 713 and 1697 of SEQ ID NO: 1, wherein:
[0920] (i) the modified BDR region comprises a maximum of 88 amino acids, and the Factor VIII polypeptide has a specific activity which is higher than the specific activity of a polypeptide of SEQ ID NO: 7; and/or
   the modified BDR region comprises a maximum of 74 amino acids.

[0921] 237. The polynucleotide according to any one of aspects 233 to 236, wherein the portion of the Factor VIII nucleotide sequence that is not wild-type is codon-optimised.

[0922] 238. The polynucleotide according to aspect 237, wherein the portion of the Factor VIII nucleotide sequence that is codon-optimised is codon-optimised for expression in human liver cells.

[0923] 239. The polynucleotide according to aspect 237 or 238, wherein the portion of the Factor VIII nucleotide sequence that is codon-optimised comprises at least two contiguous portions.

[0924] 240. The polynucleotide according to any one of aspects 237 to 239, wherein the portion of the Factor VIII nucleotide sequence that is codon-optimised does not encode amino acids corresponding to positions 746 to 1639 of SEQ ID NO: 1.

[0925] 241. The polynucleotide according to any one of aspects 237 to 240, wherein the portion of the Factor VIII nucleotide sequence that is codon-optimised does not encode the amino acid sequence of the modified BDR region or the wild-type BDR region.

[0926] 242. The polynucleotide according to any one of aspects 233 to 241, wherein the Factor VIII nucleotide sequence encodes at least one amino acid corresponding to positions 746 to 1639 of SEQ ID NO: 1.

[0927] 243. The polynucleotide according to any one of aspects 234 to 241, wherein at least a portion of the Factor VIII nucleotide sequence encodes a region of the Factor VIII amino acid sequence which does not comprise amino acids corresponding to positions 746 to 1639 of SEQ ID NO: 1.

[0928] 244. The polynucleotide according to aspect 243, wherein the portion of the Factor VIII nucleotide sequence is at least 85.5%, at least 86.0%, at least 88%, at least 90%, at least 92%, at least 95%, at least 98%, at least 99%, or 100% identical to the portion of SEQ ID NO: 3 which encodes the region of the Factor VIII amino acid sequence.

[0929] 245. The polynucleotide according to aspect 243 or 244, wherein the portion of the Factor VIII nucleotide sequence is at least 85.0%, at least 85.5%, at least 86.0%, at least 88%, at least 90%, at least 92%, at least 95%, at least 98%, at least 99%, or 100% identical to the portion of SEQ ID NO: 4 which encodes the region of the Factor VIII amino acid sequence.

[0930] 246. The polynucleotide according to any one of aspects 243 to 245, wherein the portion of the Factor VIII nucleotide sequence is at least 85.0%, at least 85.5%, at least 86.0%, at least 88%, at least 90%, at least 92%, at least 95%, at least 98%, at least 99%, or 100% identical to the portion of SEQ ID NO: 5 which encodes the region of the Factor VIII amino acid sequence.

[0931] 247. The polynucleotide according to any one of aspects 243 to 246, wherein the portion of the Factor VIII nucleotide sequence is at least 86.5%, at least 87.0%, at least 87.5%, at least 88%, at least 90%, at least 92%, at least 95%, at least 98%, at least 99%, or 100% identical to the portion of SEQ ID NO: 6 which encodes the region of the Factor VIII amino acid sequence.

[0932] 248. The polynucleotide according to any one of aspects 243 to 247, wherein the region of the Factor VIII amino acid sequence comprises at least 650, at least 700, at least 720, or 745 amino acids corresponding to positions 1 to 745 of SEQ ID NO: 1.

[0933] 249. The polynucleotide according to any one of aspects 243 to 248, wherein the region of the Factor VIII amino acid sequence comprises at least 550, at least 600, at least 650, at least 700, or 712 amino acids corresponding to positions 1640 to 2332 of SEQ ID NO: 1.

[0934] 250. The polynucleotide according to any one of aspects 243 to 249, wherein the region of the Factor VIII amino acid sequence comprises at least 1200, at least 1300, at least 1400, at least 1450, or 1457 amino acids corresponding to positions 1 to 745 and 1640 to 2332 of SEQ ID NO: 1.

[0935] 251. The polynucleotide according to any one of aspects 243 to 250, wherein the region of the Factor VIII amino acid sequence comprises amino acids corresponding to positions 714 to 745 of SEQ ID NO: 1 or a fragment thereof.

[0936] 252. The polynucleotide according to aspect 251, wherein the region of the Factor VIII amino acid sequence comprises at least 10, at least 15, at least 20, at least 25, at least 30, or 32 amino acids corresponding to positions 714 to 745 of SEQ ID NO: 1.

[0937] 253. The polynucleotide according to any one of aspects 243 to 252, wherein the region of the Factor VIII amino acid sequence comprises amino acids corresponding to positions 1640 to 1696 of SEQ ID NO: 1 or a fragment thereof.

[0938] 254. The polynucleotide according to aspect 253, wherein the region of the Factor VIII amino acid sequence comprises at least 20, at least 25, at least 30, at least 35, at least 40, at least 45, at least 50, at least 55, or 57 amino acids corresponding to positions 1640 to 1696 of SEQ ID NO: 1.

[0939] 255. The polynucleotide according to any one of aspects 243 to 254, wherein the region of the Factor VIII amino acid sequence comprises amino acids corresponding to positions 714 to 745 and 1640 to 1696 of SEQ ID NO: 1 or a fragment thereof.

[0940] 256. The polynucleotide according to aspect 255, wherein the region of the Factor VIII amino acid sequence comprises at least 30, at least 35, at least 40, at least 45, at least 50, at least 55, at least 60, at least 65, at least 70, at least 75, at least 80, at least 85, or 89 amino acids corresponding to positions 714 to 745 and 1640 to 1696 of SEQ ID NO: 1.

[0941] 257. The polynucleotide according to any one of aspects 243 to 256, wherein the region of the Factor VIII amino acid sequence does not comprise the modified BDR region.

[0942] 258. The polynucleotide according to aspect 257, wherein the region of the Factor VIII amino acid sequence comprises at least 650, at least 700, at least 710 or 713 amino acids corresponding to positions 1 to 713 of SEQ ID NO: 1.

[0943] 259. The polynucleotide according to any one of aspects 243 to 258, wherein the region of the Factor VIII amino acid sequence comprises at least 550, at least 600, at least 650, or 655 amino acids corresponding to positions 1697 to 2332 of SEQ ID NO: 1.

[0944] 260. The polynucleotide according to any one of aspects 243 to 259, wherein the region of the Factor VIII amino acid sequence comprises at least 1200, at least 1300, at least 1350 or 1368 amino acids corresponding to positions 1 to 713 and 1697 to 2332 of SEQ ID NO: 1.

[0945] 261. The polynucleotide according to any one of aspects 237 to 260, wherein the portion of the Factor VIII nucleotide sequence that is codon-optimised is at least 1500, at least 2000, at least 2500, at least 3000, at least 3500, at least 4000, at least 4100, at least 4200, at least 4300, at least 4350, 4371 or fewer, between 1500 and 4372, between 2500 and 4372, between 3500 and 4372, between 4000 and 4372, or around 4371 nucleotides in length.

[0946] 262. The polynucleotide according to any one of aspects 237 to 261, wherein the portion of the Factor VIII nucleotide sequence that is codon-optimised is at least 1500, at least 2000, at least 2500, at least 3000, at least 3500, at least 4000, at least 4100, 4104 or fewer, between 1500 and 4105, between 2500 and 4105, between 3500 and 4105, between 4000 and 4105, or around 4104 nucleotides in length.

[0947] 263. The polynucleotide according to any one of aspects 237 to 262, wherein the portion of the Factor VIII nucleotide sequence that is codon-optimised encodes a Factor VIII amino acid sequence which corresponds to a mature Factor VIII polypeptide.

[0948] 264. The polynucleotide according to any one of aspects 237 to 263, wherein the portion of the Factor VIII nucleotide sequence that is codon-optimised does not encode all or a portion of a signal peptide.

[0949] 265. The polynucleotide according to any one of aspects 237 to 263, wherein the portion of the Factor VIII nucleotide sequence that is codon-optimised encodes all or a portion of a signal peptide.

[0950] 266. The polynucleotide according to any one of aspects 237 to 265, wherein, in the portion of the Factor VIII amino acid sequence that is codon-optimised, at least 50%, at least 55%, at least 60%, at least 61%, at least 62%, at least 63%, at least 64%, at least 65%, at least 69%, at least 70%, at least 75%, or at least 78% of the codons are selected from the group consisting of: TTC, CTG, ATC, GTG, TCC, AGT, AGC, CCT, CCC, ACC, ACA, GCC, TAC, CAC, CAG, AAC, AAG, GAC, GAG, TGT, AGA, and GGC.

[0951] 267. The polynucleotide according to aspect 266, wherein, in the portion of the Factor VIII amino acid sequence that is codon-optimised, at least 60% of the codons are selected from the group consisting of: TTC, CTG, ATC, GTG, TCC, AGT, AGC, CCT, CCC, ACC, ACA, GCC, TAC, CAC, CAG, AAC, AAG, GAC, GAG, TGT, AGA, and GGC.

[0952] 268. The polynucleotide according to any one of aspects 233 to 267, wherein the Factor VIII polypeptide encoded by the Factor VIII nucleotide sequence is expressed in human liver cells at higher levels compared to a reference wild-type Factor VIII nucleotide sequence.

[0953] 269. The polynucleotide according to any one of aspects 233 to 268, wherein the Factor VIII polypeptide encoded by the Factor VIII nucleotide sequence is expressed in human liver cells at least 1.1 fold, at least 1.2 fold, at least 1.5 fold, at least 1.8 fold, at least 2 fold, at least 5 fold, at least 10 fold, at least 20 fold, at least 30 fold, at least 40 fold, or at least 50 fold higher compared to a reference wild-type Factor VIII nucleotide sequence.

[0954] 270. The polynucleotide according to aspect 268 or 269, wherein the reference wild-type Factor VIII nucleotide sequence is the Factor VIII nucleotide sequence of SEQ ID NO: 2.

[0955] 271. The polynucleotide according to any one of aspects 233 to 270, wherein the Factor VIII polypeptide encoded by the Factor VIII nucleotide sequence is expressed in human liver cells at at least 50%, at least 60%, at least 70%, at least 75%, at least 80%, at least 85%, at least 90%, at least 95%, at least 98%, at least 99%, or at least 100% of the level expressed by a polypeptide encoded by the polynucleotide of SEQ ID NO: 3.

[0956] 272. The polynucleotide according to any one of aspects 233 to 271, wherein the Factor VIII polypeptide encoded by the Factor VIII nucleotide sequence is expressed in human liver cells at at least 50%, at least 60%, at least 70%, at least 75%, at least 80%, at least 85%, at least 90%, at least 95%, at least 98%, at least 99%, or at least 100% of the level expressed by a polypeptide encoded by the polynucleotide of SEQ ID NO: 4.

[0957] 273. The polynucleotide according to any one of aspects 233 to 272, wherein the Factor VIII polypeptide encoded by the Factor VIII nucleotide sequence is expressed in human liver cells at at least 50%, at least 60%, at least 70%, at least 75%, at least 80%, at least 85%, at least 90%, at least 95%, at least 98%, at least 99%, or at least 100% of the level expressed by a polypeptide encoded by the polynucleotide of SEQ ID NO: 5.

[0958] 274. The polynucleotide according to any one of aspects 233 to 273, wherein the Factor VIII polypeptide encoded by the Factor VIII nucleotide sequence is expressed in human liver cells at at least 50%, at least 60%, at least 70%, at least 75%, at least 80%, at least 85%, at least 90%, at least 95%, at least 98%, at least 99%, or at least 100% of the level expressed by a polypeptide encoded by the polynucleotide of SEQ ID NO: 6.

[0959] 275. The polynucleotide according to any one of aspects 234 to 274, wherein the Factor VIII nucleotide sequence encoding the Factor VIII amino acid sequence comprises a sequence that is at least 85.5%, at least 86.0%, at least 88%, at least 90%, at least 92%, at least 95%, at least 98%, at least 99% or 100% identical to the portion of SEQ ID NO: 3 which encodes the Factor VIII amino acid sequence.

[0960] 276. The polynucleotide according to aspect 275, wherein the Factor VIII nucleotide sequence encoding the Factor VIII amino acid sequence comprises a sequence that is at least 85.5%, at least 86.0%, at least 88%, at least 90%, at least 92%, at least 95%, at least 98%, at least 99% or 100% identical to SEQ ID NO: 3.

[0961] 277. The polynucleotide according to aspect 275 or 276, wherein the Factor VIII nucleotide sequence encoding the Factor VIII amino acid sequence comprises the sequence of SEQ ID NO: 3.

[0962] 278. The polynucleotide according to any one of aspects 234 to 277, wherein the Factor VIII nucleotide sequence encoding the Factor VIII amino acid sequence comprises a sequence that is at least 85.0%, at least 85.5%, at least 86.0%, at least 88%, at least 90%, at least 92%, at least 95%, at least 98%, at least 99% or 100% identical to the portion of SEQ ID NO: 4 which encodes the Factor VIII amino acid sequence.

[0963] 279. The polynucleotide according to aspect 278, wherein the Factor VIII nucleotide sequence encoding the Factor VIII amino acid sequence comprises a sequence that is at least 85.0%, at least 85.5%, at least 86.0%, at least 88%, at least 90%, at least 92%, at least 95%, at least 98%, at least 99% or 100% identical to SEQ ID NO: 4.

[0964] 280. The polynucleotide according to aspect 278 or 279, wherein the Factor VIII nucleotide sequence encoding the Factor VIII amino acid sequence comprises the sequence of SEQ ID NO: 4.

[0965] 281. The polynucleotide according to any one of aspects 234 to 280, wherein the Factor VIII nucleotide sequence encoding the Factor VIII amino acid sequence comprises a sequence that is at least 85.0%, at least 85.5%, at least 86.0%, at least 88%, at least 90%, at least 92%, at least 95%, at least 98%, at least 99% or 100% identical to the portion of SEQ ID NO: 5 which encodes the Factor VIII amino acid sequence.

[0966] 282. The polynucleotide according to aspect 281, wherein the Factor VIII nucleotide sequence encoding the Factor VIII amino acid sequence comprises a sequence that is at least 85.0%, at least 85.5%, at least 86.0%, at least 88%, at least 90%, at least 92%, at least 95%, at least 98%, at least 99% or 100% identical to SEQ ID NO: 5.

[0967] 283. The polynucleotide according to aspect 281 or 282, wherein the Factor VIII nucleotide sequence encoding the Factor VIII amino acid sequence comprises the sequence of SEQ ID NO: 5.

[0968] 284. The polynucleotide according to any one of aspects 234 to 283, wherein the Factor VIII nucleotide sequence encoding the Factor VIII amino acid sequence comprises a sequence that is at least 86.5%, at least 87.0%, at least 87.5%, at least 88.0%, at least 90%, at least 92%, at least 95%, at least 98%, at least 99% or 100% identical to the portion of SEQ ID NO: 6 which encodes the Factor VIII amino acid sequence.

[0969] 285. The polynucleotide according to aspect 284, wherein the Factor VIII nucleotide sequence encoding the Factor VIII amino acid sequence comprises a sequence that is at least 86.5%, at least 87.0%, at least 87.5%, at least 88.0%, at least 90%, at least 92%, at least 95%, at least 98%, at least 99% or 100% identical to SEQ ID NO: 6.

[0970] 286. The polynucleotide according to aspect 284 or 285, wherein the Factor VIII nucleotide sequence encoding the Factor VIII amino acid sequence comprises the sequence of SEQ ID NO: 6.

[0971] 287. The polynucleotide according to any one of aspects 234 to 275, wherein the Factor VIII nucleotide sequence encoding the Factor VIII amino acid sequence comprises the sequence of SEQ ID NO: 39, SEQ ID NO: 40, SEQ ID NO: 41, or SEQ ID NO: 42, preferably SEQ ID NO: 39.

[0972] 288. The polynucleotide according to any one of aspects 233 to 287, wherein the Factor VIII nucleotide encodes a Factor VIII amino acid sequence as defined in any one of aspects 191 to 232.

[0973] 289. The polynucleotide according to aspect 288, wherein the Factor VIII nucleotide sequence encoding the Factor VIII amino acid sequence comprises a nucleotide sequence that is at least 85%, at least 90%, at least 95%, at least 96%, at least 97%, at least 98%, at least 99% or 100% identical to the nucleotide sequence set forth in SEQ ID NO: 76, or a nucleotide sequence that is at least 85%, at least 90%, at least 95%, at least 96%, at least 97%, at least 98%, at least 99% or 100% identical to a nucleotide sequence comprising at least 4047 nucleotides of SEQ ID NO: 76.

[0974] 290. The polynucleotide according aspect 288 or 289, wherein the Factor VIII nucleotide sequence encoding the Factor VIII amino acid sequence comprises the nucleotide sequence set forth in SEQ ID NO:75 or a nucleotide sequence that is at least 85%, at least 90%, at least 95%, at least 96%, at least 97%, at least 98%, at least 99% or 100% identical to the nucleotide sequence set forth in SEQ ID NO:75.

[0975] 291. A recombinant AAV construct which comprises a polynucleotide comprising a Factor VIII nucleotide sequence, wherein the Factor VIII nucleotide sequence encodes a Factor VIII polypeptide comprising a Factor VIII amino acid sequence.

[0976] 292. The recombinant AAV construct according to aspect 291 which is less than 4900 nucleotides in length.

[0977] 293. The recombinant AAV construct according to aspect 291 or 292, which is between 4700 and 4900, between 4850 and 4900, or around 4713 nucleotides in length.

[0978] 294. The recombinant AAV construct according to any one of aspects 291 to 293, which is less than 4850, less than 4800, or less than 4750 nucleotides in length.

[0979] 295. The recombinant AAV construct according to any one of aspects 291 to 294, which is between 4700 and 4900, between 4700 and 4850, between 4700 and 4800, between 4700 and 4750 or around 4713 nucleotides in length.

[0980] 296. The recombinant AAV construct according to any one of aspects 291 to 295, wherein the Factor VIII polypeptide is the Factor VIII polypeptide according to any one of aspects 1 to 232.

[0981] 297. The recombinant AAV construct according to any one of aspects 291 to 296, wherein the Factor VIII amino acid sequence does not comprise amino acids corresponding to positions 746 to 1639 of SEQ ID NO: 1.

[0982] 298. The recombinant AAV construct according to any one of aspects 291 to 297, wherein the Factor VIII amino acid sequence is SEQ ID NO: 7.

[0983] 299. The recombinant AAV construct according to any one of aspects 291 to 297, wherein the Factor VIII amino acid sequence is SEQ ID NO: 8.

[0984] 300. The recombinant AAV construct according to any one of aspects 291 to 299, wherein the polynucleotide is the polynucleotide according to any one of aspects 233-290.

[0985] 301. The recombinant AAV construct according to any one of aspects 291 to 300, wherein the recombinant AAV construct is single-stranded.

[0986] 302. The recombinant AAV construct according to any one of aspects 291 to 301, further comprising a transcriptional regulatory element.

[0987] 303. The recombinant AAV construct according to aspect 302, wherein the transcription regulatory element comprises a liver-specific promoter.

[0988] 304. The recombinant AAV construct according to aspect 302 or 303, wherein the transcription regulatory element is fewer than 270 nucleotides in length.

[0989] 305. The recombinant AAV construct according to any one of aspects 302 to 304, wherein the transcription regulatory element comprises a core nucleotide sequence which comprises or consists of a nucleotide sequence having at least 95% identity to SEQ ID NO: 43, or a sequence which differs from SEQ ID NO: 43 by a single nucleotide, and wherein the transcription regulatory element is between 80 and 280 nucleotides in length; optionally wherein the transcription regulatory element is between 80 and 225 nucleotides in length.

[0990] 306. The recombinant AAV construct according to any one of aspects 302 to 305, wherein the transcription regulatory element comprises a core nucleotide sequence which comprises or consists of a sequence having at least 95% identity to SEQ ID NO: 43, or a sequence which differs from SEQ ID NO: 43 by a single nucleotide, wherein the transcription regulatory element:
[0991] (a) does not comprise at least 20, at least 30 or at least 40 consecutive nucleotides of SEQ ID NO: 48 and/or
[0992] (b) does not comprise at least 20, at least 30 or at least 40 consecutive nucleotides of SEQ ID NO: 49;
[0993] and wherein the transcription regulatory element is between 80 and 280 nucleotides in length.

[0994] 307. The recombinant AAV construct according to aspect 305 or 306, wherein the transcription regulatory element further comprises a nucleotide sequence located 3′ to the core nucleotide sequence, and the nucleotide sequence located 3′ to the core nucleotide sequence comprises or consists of a nucleotide sequence:
[0995] a. of SEQ ID NO: 44, or a sequence which differs from SEQ ID NO: 44 by a single nucleotide;
[0996] b. of SEQ ID NO: 45, or a sequence which differs from SEQ ID NO: 45 by a single nucleotide;
[0997] c. of SEQ ID NO: 46, or a sequence which differs from SEQ ID NO: 46 by a single nucleotide;
[0998] d. having at least 95% identity to SEQ ID NO: 47, or a sequence which differs from SEQ ID NO: 47 by a single nucleotide.

[0999] 308. The recombinant AAV construct according to aspect 307, wherein the nucleotide sequence located 3′ to the core nucleotide sequence is shorter than 50 nucleotides; optionally is shorter than 40 nucleotides; and optionally is shorter than 30 nucleotides.

[1000] 309. The recombinant AAV construct according to any one of aspects 305 to 308, wherein the transcription regulatory element:

[1001] a. does not comprise a nucleotide sequence according to SEQ ID NO: 48, or does not comprise at least 20, at least 30 or at least 40 consecutive nucleotide of SEQ ID NO: 48; and/or
[1002] b. does not comprise a nucleotide sequence according to SEQ ID NO: 49 or does not comprise at least 20, at least 30 or at least 40 consecutive nucleotide of SEQ ID NO: 49.

[1003] 310. The recombinant AAV construct according to aspect 309, wherein the transcription regulatory element:
[1004] a. does not comprise a sequence having at least 90% or at least 95% identity to SEQ ID NO: 48; and/or
[1005] b. does not comprise a sequence having at least 90% or at least 95% identity to SEQ ID NO: 49.

[1006] 311. The recombinant AAV construct according to any one of aspects 305 to 310, wherein the transcription regulatory element is shorter than 200 nucleotides, optionally shorter than 150 nucleotides, optionally shorter than 125 nucleotides.

[1007] 312. The recombinant AAV construct according to any one of aspects 305 to 311, wherein the transcription regulatory element is at least 85 nucleotides in length, optionally at least 100 nucleotides in length, optionally at least 110 nucleotides in length.

[1008] 313. The recombinant AAV construct according to any one of aspects 305 to 312, wherein the transcription regulatory element terminates in a ten-nucleotide sequence selected from:
[1009] a. acagtgaatc; or
[1010] b. ctcctcagct.

[1011] 314. The recombinant AAV construct according to any one of aspects 305 to 313, wherein the core nucleotide sequence is 73-80 nucleotides in length.

[1012] 315. The recombinant AAV construct according to any one of aspects 305 to 314, wherein the core nucleotide sequence has at least 95% identity, and optionally at least 98% identity, to SEQ ID NO: 50.

[1013] 316. The recombinant AAV construct according to any one of aspects 305 to 315, wherein the transcription regulatory element comprises or consists of a sequence which has at least 90% identity, optionally at least 95% identity, or optionally at least 98% identity to SEQ ID NO: 51.

[1014] 317. The recombinant AAV construct of aspect 316, wherein the transcription regulatory element comprises or consists of a sequence of SEQ ID NO: 51.

[1015] 318. The recombinant AAV construct according to any one of aspects 302 to 317, wherein the transcription regulatory element is operably linked to the Factor VIII nucleotide sequence.

[1016] 319. The recombinant AAV construct according to aspect 318, wherein the transcription regulatory element expresses the Factor VIII nucleotide sequence at 50% or better, 80% or better or 100% or better compared to a transcription regulatory element defined by SEQ ID NO: 52 optionally wherein expression of the Factor VIII nucleotide sequence is determined in vitro in Huh7 cells.

[1017] 320. The recombinant AAV construct according to any one of aspects 291 to 319, further comprising a nucleotide sequence encoding a signal peptide.

[1018] 321. The recombinant AAV construct according to aspect 320, wherein the signal peptide is a wild-type Factor VIII signal peptide.

[1019] 322. The recombinant AAV construct according to aspect 320 or 321, wherein the signal peptide comprises SEQ ID NO: 53 or wherein the nucleotide sequence encoding the signal peptide comprises SEQ ID NO: 54 or 55.

[1020] 323. The recombinant AAV construct according to aspect 320, wherein the signal peptide is not a wild-type Factor VIII signal peptide.

[1021] 324. The recombinant AAV construct according to aspect 323, wherein the Factor VIII polypeptide or fragment thereof encoded by the Factor VIII nucleotide sequence is expressed in plasma at a higher level following administration of the recombinant AAV construct compared to the administration of an equivalent dose of an equivalent recombinant AAV construct which comprises a wild-type Factor VIII signal peptide.

[1022] 325. The recombinant AAV construct according to aspect 323 or 324, wherein the Factor VIII polypeptide or fragment thereof encoded by the Factor VIII nucleotide sequence is expressed in plasma at least 1.1 fold, at least 1.2 fold, at least 1.5 fold, at least 1.8 fold, at least 2 fold, at least 5 fold higher compared to the equivalent recombinant AAV construct which comprises a wild-type Factor VIII signal peptide.

[1023] 326. The recombinant AAV construct according to any one of aspects 323 to 325, wherein the signal peptide comprises a sequence that is at least 90%, at least 92%, at least 95%, at least 98%, at least 99% or 100% identical to the sequence of any one of SEQ ID NOs: 56, 58 or 60.

[1024] 327. The recombinant AAV construct according to aspect 326, wherein the signal peptide comprises SEQ ID NO: 56 or wherein the nucleotide sequence encoding the signal peptide comprises SEQ ID NO: 57.

[1025] 328. The recombinant AAV construct according to aspect 326, wherein the signal peptide comprises SEQ ID NO: 60 or wherein the nucleotide sequence encoding the signal peptide comprises SEQ ID NO: 61.

[1026] 329. The recombinant AAV construct according to aspect 326, wherein the signal peptide comprises SEQ ID NO: 58 or wherein the nucleotide sequence encoding the signal peptide comprises SEQ ID NO: 59.

[1027] 330. The recombinant AAV construct according to any one of aspects 320, 323 to 327 or 329, wherein the nucleotide sequence encoding the signal peptide is fewer than 57 nucleotides in length.

[1028] 331. The recombinant AAV construct according to aspect 320, 323 to 327, 329 or 330, wherein the nucleotide sequence encoding the signal peptide is around 54 nucleotides in length.

[1029] 332. The recombinant AAV construct according to any one of aspects 291 to 331, further comprising a polyA nucleotide sequence.

[1030] 333. The recombinant AAV construct according to aspect 332, wherein the polyA nucleotide sequence comprises the nucleotide sequence of any one of SEQ ID NOs: 63 to 66.

[1031] 334. The recombinant AAV construct according to aspect 332 or 333, wherein the polyA nucleotide sequence is fewer than 50, or around 49 nucleotides in length.

[1032] 335. The recombinant AAV construct according to aspect 333 or 334, wherein the polyA nucleotide sequence comprises the nucleotide sequence of SEQ ID NO: 65.

[1033] 336. The recombinant AAV construct according to any one of aspects 291 to 335, further comprising one or two ITR(s).

[1034] 337. The recombinant AAV construct according to aspect 336, wherein the nucleotide sequence of the or each ITR is fewer than 157, fewer than 154, or around 145 nucleotides in length.

[1035] 338. The recombinant AAV construct according to aspect 336 or 337, wherein the or each ITR is a wild-type ITR.

[1036] 339. The recombinant AAV construct according to any one of aspects 336 to 338, wherein the or each ITR is an AAV2 ITR.

[1037] 340. The recombinant AAV construct according to any one of aspects 336 to 339, wherein the nucleotide sequence of the or each ITR comprises a nucleotide sequence of SEQ ID NO: 67 or SEQ ID NO: 70.

[1038] 341. The recombinant AAV construct according to any one of aspects 291 to 340, wherein the AAV construct is an AAV genome.

[1039] 342. The recombinant AAV construct according to any one of aspects 291 to 297, 300 to 320, 323 to 326, 330 to 341, wherein the Factor VIII nucleotide sequence encoding the Factor VIII amino acid sequence comprises the sequence of SEQ ID NO: 39 or SEQ ID NO: 75 and the nucleotide sequence encoding the signal peptide comprises the nucleotide sequence of SEQ ID NO: 57.

[1040] 343. The recombinant AAV construct according to aspect 342, wherein the recombinant AAV construct comprises a transcriptional regulatory element which is a liver-specific promoter, and the liver-specific promoter comprises the nucleotide sequence of SEQ ID NO: 51.

[1041] 344. The recombinant AAV construct according to aspect 343, wherein the recombinant AAV construct comprises two ITRs and a polyA nucleotide sequence, wherein the nucleotide sequence of each ITR is SEQ ID NO: 67 and/or SEQ ID NO: 70 and the polyA nucleotide sequence comprises the nucleotide sequence of SEQ ID NO: 65.

[1042] 345. The recombinant AAV construct according to any one of aspects 291 to 344, wherein the recombinant AAV construct comprises or consists of SEQ ID NO:71.

[1043] 346. The recombinant AAV construct according to any one of aspects 292 to 345, wherein vector genome yield is increased when said recombinant AAV construct is used to produce AAV viral particles when compared to the vector genome yield obtained when a comparator recombinant AAV construct which is more than 4900 nucleotides in length is used.

[1044] 347. The recombinant AAV construct according to aspect 346, wherein the vector genome yield is at least 1.5, at least 2, at least 2.25, at least 2.5, at least 2.75, at least 3, at least 4, or at least 5 fold higher than the vector genome yield obtained when the comparator recombinant AAV construct is used, optionally wherein the vector genome yield is between 1.25 and 3 fold higher, between 1.5 and 3 fold higher, or between 2 and 3 fold higher than the vector genome yield obtained when the comparator recombinant AAV construct is used.

[1045] 348. The recombinant AAV construct according to any one of aspects 292 to 347, wherein vector genome to total particle ratio is increased when said recombinant AAV construct is used to produce AAV viral particles when compared to the vector genome to total particle ratio obtained when a comparator recombinant AAV construct which is more than 4900 nucleotides in length is used.

[1046] 349. The recombinant AAV construct according to aspect 348, wherein the vector genome to total particle ratio is at least 1.25, at least 1.5, at least 1.75, at least 2, at least 2.25, at least 2.5, at least 2.75, at least 3, at least 3.25, at least 3.5, at least 4, or at least 5 fold higher than the vector genome to total particle ratio obtained when the comparator recombinant AAV construct is used, optionally wherein the vector genome to total particle ratio is between 1.25 and 4 fold higher, or between 1.5 and 3.5 fold higher than the vector genome to total particle ratio obtained when the comparator recombinant AAV construct is used.

[1047] 350. The recombinant AAV construct according to any one of aspects 292 to 349, wherein nucleic acid impurity level, optionally plasmid-derived impurity level, is decreased when said recombinant AAV construct is used to produce AAV viral particles when compared to the impurity level obtained when a comparator recombinant AAV construct which is more than 4900 nucleotides in length is used.

[1048] 351. The recombinant AAV construct according to aspect 350, wherein the nucleic acid impurity level is 85% or lower, 75% or lower, 60% or lower, 50% or lower, 40% or lower, 30% or lower, or 20% or lower than the nucleic acid impurity level obtained when the comparator recombinant AAV construct is used, optionally wherein the nucleic acid impurity level is between 40% and 80%, or between 50% and 70%, or between 15% and 55% of the nucleic acid impurity level obtained when the comparator recombinant AAV construct is used.

[1049] 352. The recombinant AAV construct according to aspect 350 or 351, wherein the nucleic acid impurity is an AAV cap-derived nucleic acid.

[1050] 353. The recombinant AAV construct according to any one of aspects 346 to 352, wherein when the recombinant AAV construct and the comparator recombinant AAV construct are used to produce AAV viral particles, the same AAV production system is used in each case, optionally wherein said AAV production system is a mammalian production system, optionally wherein said AAV production system is a two-plasmid system consisting of a helper plasmid comprising sequences encoding AAV Rep functions and a vector plasmid comprising sequences encoding AAV Cap functions.

[1051] 354. The recombinant AAV construct according aspect 353, wherein the AAV production system is a two-plasmid system consisting of a helper plasmid comprising AAV Rep functions and a vector plasmid comprising AAV Cap functions, and wherein the molar ratio of helper plasmid to vector plasmid is between about 12:1 and 1:12, between about 1:10 and 10:1, between about 1:5 and 5:1, between about 1:3 and 4:3 or between about 1:2 and 1:4, optionally wherein the molar ratio of helper plasmid to vector plasmid is around 4:3 or around 1:3.

[1052] 355. The recombinant AAV construct according to any one of aspects 346 to 354, wherein the recombinant AAV construct is between 4500 and 4900, between 4500 and 4850, between 4500 and 4750, around 4715, or around 4713 nucleotides in length.

[1053] 356. The recombinant AAV construct according to any one of aspects 346 to 355, wherein the recombinant AAV construct is 4713 nucleotides in length.

[1054] 357. The recombinant AAV construct according to any one of aspects 346 to 356, wherein the comparator recombinant AAV construct is more than 4910, more than 4920, more than 4930, more than 4940, more than 4950, more than 4960, more than 4970, more than 4980, more than 4990, or more than 5000 nucleotides in length, optionally wherein the comparator recombinant AAV construct comprises or consists of SEQ ID NO: 72.

[1055] 358. An AAV viral particle comprising the recombinant AAV construct according to any one of aspects 291 to 357.

[1056] 359. The AAV viral particle according to aspect 358, wherein the viral particle comprises a capsid.

[1057] 360. The AAV viral particle according to aspect 359, wherein the capsid is selected from the group consisting of:
[1058] (i) a capsid comprising a sequence which is at least 96%, at least 98%, at least 99%, at least 99.5%, at least 99.8% or 100% identical to SEQ ID NO: 68;
[1059] (ii) a capsid comprising a sequence which is at least 96%, at least 98%, at least 99%, at least 99.5%, at least 99.8%, or 100% identical to SEQ ID NO: 69;
[1060] (iii) a liver-tropic capsid; and
[1061] (iv) an AAVS capsid.

[1062] 361. The AAV viral particle according to aspect 359, wherein the capsid is selected from the group consisting of:
[1063] (i) a capsid comprising a sequence which is at least 96%, at least 98%, at least 99%, at least 99.5%, at least 99.8% or 100% identical to SEQ ID NO: 91;
[1064] (ii) a capsid comprising a sequence which is at least 96%, at least 98%, at least 99%, at least 99.5%, at least 99.8%, or 100% identical to SEQ ID NO: 92; and
[1065] (iii) an AAV6 capsid.

[1066] 362. The recombinant AAV construct or AAV viral particle according to any one of aspects 291 to 361, wherein the activity of the polypeptide encoded by the Factor VIII nucleotide sequence achieved is higher following administration of the recombinant AAV construct or AAV viral particle compared to the administration of an equivalent dose of an equivalent recombinant AAV construct or AAV viral particle which comprises the AAV construct of SEQ ID NO: 1 of WO 2017/053677 (SEQ ID NO: 72).

[1067] 363. The recombinant AAV construct or AAV viral particle according to aspect 362, wherein the activity of the polypeptide encoded by the Factor VIII nucleotide sequence achieved is at least 1.1 fold, at least 1.2 fold, at least 1.5 fold, at least 1.8 fold, at least 2 fold, or at least 5 fold higher compared to the equivalent recombinant AAV construct or AAV viral particle which comprises the AAV construct of SEQ ID NO: 1 of WO 2017/053677 (SEQ ID NO: 72).

[1068] 364. A Factor VIII polypeptide encoded by the polynucleotide or recombinant AAV construct according to any one of aspects 233 to 357.

[1069] 365. A composition comprising the Factor VIII polypeptide, polynucleotide, recombinant AAV construct or AAV viral particle according to any one of aspects 1 to 364, and a pharmaceutically acceptable excipient.

[1070] 366. The Factor VIII polypeptide, polynucleotide, recombinant AAV construct, AAV viral particle or composition according to any one of aspects 1 to 365 for use in a method of treatment.

[1071] 367. The Factor VIII polypeptide, polynucleotide, recombinant AAV construct, AAV viral particle or composition for use according to aspect 366, wherein the method of treatment comprises administering an effective amount of the Factor VIII polypeptide, polynucleotide, recombinant AAV construct or AAV viral particle of any one of aspects 1 to 365 to a patient.

[1072] 368. A method of treatment comprising administering an effective amount of the Factor VIII polypeptide, polynucleotide, recombinant AAV construct, AAV viral particle or composition according to any one of aspects 1 to 365 to a patient.

[1073] 369. Use of the Factor VIII polypeptide, polynucleotide, recombinant AAV construct, AAV viral particle or composition according to any one of aspects 1 to 365 in the manufacture of a medicament for use in a method of treatment.

[1074] 370. The use according to aspect 369 wherein the method of treatment comprises administering an effective amount of the Factor VIII polypeptide, polynucleotide, recombinant AAV construct, AAV viral particle or composition according to any one of aspects 1 to 365 to a patient.

[1075] 371. The Factor VIII polypeptide, polynucleotide, recombinant AAV construct, AAV viral particle, composition, method or use according to any one of aspects 366 to 370, wherein the method of treatment is a method of treating haemophilia.

[1076] 372. The Factor VIII polypeptide, polynucleotide, recombinant AAV construct, AAV viral particle, composition, method or use according to any one of aspects 366 to 371, wherein the method of treatment is a method of treating haemophilia A.

[1077] 373. Use of the recombinant AAV construct as defined in any one of aspects 291-357 for producing a population of AAV viral particles.

[1078] 374. The use according to aspect 373, wherein the AAV construct is less than 4900 nucleotides in length, wherein the population of AAV viral particles:
[1079] a) has an increased vector genome yield when compared to the vector genome yield obtained when a comparator recombinant AAV construct is used;
[1080] b) has an increased vector genome to total particle ratio when compared to the vector genome to total particle ratio obtained when a comparator recombinant AAV construct is used; and/or
[1081] c) has a decreased nucleic acid impurity level when compared to the nucleic acid impurity level obtained when a comparator recombinant AAV construct is used; wherein the comparator recombinant AAV construct is more than 4900 nucleotides in length.

[1082] 375. Use of a recombinant AAV construct as defined in any one of aspects 292-357 for:
[1083] a) increasing the vector genome yield during AAV viral particle production when compared to the vector genome yield obtained when a comparator recombinant AAV construct is used;
[1084] b) increasing the vector genome to total particle ratio during AAV viral particle production when compared to the vector genome to total particle ratio obtained when a comparator recombinant AAV construct is used; and/or
[1085] c) decreasing the nucleic acid impurity level during AAV viral particle production when compared to the nucleic acid impurity level obtained when a comparator recombinant AAV construct is used;
   wherein the comparator recombinant AAV construct is more than 4900 nucleotides in length.

[1086] 376. The use according to any one of aspects 373 to 375, wherein the use comprises transfecting a host cell with the recombinant AAV construct of any one of aspects 291-357 and culturing the host cell under conditions suitable for AAV viral particle production.

[1087] 377. The use according to any one of aspects 374 to 376, wherein the vector genome yield is at least 1.5, at least 2, at least 2.25, at least 2.5, at least 2.75, at least 3, at least 4, or at least 5 fold higher than the vector genome yield obtained when the comparator recombinant AAV construct is used, optionally wherein the vector genome yield is between 1.25 and 3 fold higher, between 1.5 and 3 fold higher, or between 2 and 3 fold higher than the vector genome yield obtained when the comparator recombinant AAV construct is used.

[1088] 378. The use according to any one of aspects 374 to 377, wherein the vector genome to total particle ratio is at least 1.25, at least 1.5, at least 1.75, at least 2, at least 2.25, at least 2.5, at least 2.75, at least 3, at least 3.25, at least 3.5, at least 4, or at least 5 fold higher than the vector genome to total particle ratio obtained when the comparator recombinant AAV construct is used, optionally wherein the vector genome to total particle ratio is between 1.25 and 4 fold higher, or between 1.5 and 3.5 fold higher than the vector genome to total particle ratio obtained when the comparator recombinant AAV construct is used.

[1089] 379. The use according to any one of aspects 374 to 378, wherein the nucleic acid impurity level is 85% or lower, 75% or lower, 60% or lower, 50% or lower, 40% or lower, 30% or lower, or 20% or lower than the nucleic acid impurity level obtained when the comparator recombinant AAV construct is used, optionally wherein the nucleic acid impurity level is between 40% and 80%, between 50% and 70%, or between 15% and 55% of the nucleic acid impurity level obtained when the comparator recombinant AAV construct is used.

[1090] 380. A method for producing a population of AAV viral particles comprising:
[1091] a) obtaining the recombinant AAV construct as defined in any one of aspects 291-357;
[1092] b) transfecting a host cell with the said recombinant AAV construct; and
[1093] c) culturing the host cell under conditions suitable for AAV viral particle production.

[1094] 381. A method for increasing the vector genome yield during the production of a population of AAV viral particles, comprising:
[1095] a) obtaining the recombinant AAV construct as defined in any one of aspects 292-357;
[1096] b) transfecting a host cell with the said recombinant AAV construct; and
[1097] c) culturing the host cell under conditions suitable for AAV viral particle production;
   wherein the vector genome yield is increased when compared to the vector genome yield obtained when a comparator recombinant AAV construct of more than 4900 nucleotides in length is used.

[1098] 382. The method according to aspect 381, wherein the vector genome yield is at least 1.5, at least 2, at least 2.25, at least 2.5, at least 2.75, at least 3, at least 4, or at least 5 fold higher than the vector genome yield obtained when the comparator recombinant AAV construct is used, optionally wherein the vector genome yield is between 1.25 and 3 fold higher, between 1.5 and 3 fold higher, or between 2 and 3 fold higher than the vector genome yield obtained when the comparator recombinant AAV construct is used.

[1099] 383. A method for increasing the vector genome to total particle ratio during the production of a population of AAV viral particles, comprising:
[1100] a) obtaining the recombinant AAV construct as defined in any one of aspects 292-357;
[1101] b) transfecting a host cell with the said recombinant AAV construct; and
[1102] c) culturing the host cell under conditions suitable for AAV viral particle production;
   wherein the vector genome to total particle ratio is increased when compared to the vector genome to total particle ratio obtained when a comparator recombinant AAV construct of more than 4900 nucleotides in length is used.

[1103] 384. The method according to aspect 383, wherein the vector genome to total particle ratio is at least 1.25, at least 1.5, at least 1.75, at least 2, at least 2.25, at least 2.5, at least 2.75, at least 3, at least 3.25, at least 3.5, at least 4, or at least 5 fold higher than the vector genome to total particle ratio obtained when the comparator recombinant AAV construct is used, optionally wherein the vector genome to total particle ratio is between 1.25 and 4 fold higher, or between 1.5 and 3.5 fold higher than the vector genome to total particle ratio obtained when the comparator recombinant AAV construct is used.

[1104] 385. A method for decreasing the nucleic acid impurity level during the production of a population of AAV viral particles, comprising:
[1105] a) obtaining the recombinant AAV construct as defined in any one of aspects 292-357;
[1106] b) transfecting a host cell with the said recombinant AAV construct; and
[1107] c) culturing the host cell under conditions suitable for AAV viral particle production;
   wherein the nucleic acid impurity level is decreased when compared to the nucleic acid impurity level obtained when a comparator recombinant AAV construct of more than 4900 nucleotides in length is used.

[1108] 386. The method according to aspect 385, wherein the nucleic acid impurity level is 85% or lower, 75% or lower, 60% or lower, 50% or lower, 40% or lower, 30% or lower, or 20% or lower than the nucleic acid impurity level obtained when the comparator recombinant AAV construct is used, optionally wherein the nucleic acid impurity level is between 40% and 80%, between 50% and 70%, or between 15% and 55% of the nucleic acid impurity level obtained when the comparator recombinant AAV construct is used.

[1109] 387. The method according to any one of aspects 376 to 386, further comprising a step of harvesting the AAV viral particles to provide a population of AAV viral particles.

[1110] 388. The method or use according to any one of aspects 376 to 387, wherein the host cell is selected from the group consisting of a HEK293T cell, a HEK293 cell, a HEK293EBNA cell, a CAP cell, a CAP-T cell, an AGE1.CR cell, a PerC6 cell, a C139 cell, and an EB66 cell.

[1111] 389. The method or use according to any one of aspects 376 to 388, further comprising a step of purifying the AAV viral particles.

[1112] 390. The method or use according to aspect 389, where the step of purifying the AAV viral particles is carried out using a technique selected from the group consisting of gradient density centrifugation (such as CsCl or Iodixanol gradient density centrifugation), filtration, ion exchange chromatography, size exclusion chromatography, affinity chromatography and hydrophobic interaction chromatography.

[1113] 391. The method or use according to aspect 389 or 390, comprising further concentrating the AAV viral particles using ultracentrifugation, tangential flow filtration, or gel filtration.

[1114] 392. The method or use according to any one of aspects 376 to 391, comprising formulating the AAV viral particles with a pharmaceutically acceptable excipient.

[1115] 393. The method or use according to any one of aspects 374 to 379 or 381 to 392, wherein the comparator is more than 4910, more than 4920, more than 4930, more than 4940, more than 4950, more than 4960, more than 4970, more than 4980, more than 4990, or more than 5000 nucleotides in length, optionally wherein the comparator comprises or consists of SEQ ID NO: 72.

[1116] 394. A population of AAV viral particles obtained or obtainable by the method of any one of aspects 380 to 393.

1. A recombinant AAV construct which is less than 4900 nucleotides in length and which comprises a polynucleotide comprising a Factor VIII nucleotide sequence, wherein the Factor VIII nucleotide sequence encodes a Factor VIII polypeptide comprising a Factor VIII amino acid sequence.

2. The recombinant AAV construct according to claim 1, which is:
(i) between 4700 and 4900, between 4850 and 4900, or around 4713 nucleotides in length; and/or
(ii) less than 4850, less than 4800, or less than 4750 nucleotides in length; and/or
(iii) between 4700 and 4900, between 4700 and 4850, between 4700 and 4800, between 4700 and 4750 or around 4713 nucleotides in length.

3. The recombinant AAV construct according to claim 1 or 2, wherein the Factor VIII amino acid sequence:
(i) does not comprise amino acids corresponding to positions 746 to 1639 of SEQ ID NO: 1; and/or
(ii) is SEQ ID NO: 7 or SEQ ID NO: 8.

4. The recombinant AAV construct according to any one of claims 1 to 3, further comprising a transcriptional regulatory element, optionally wherein the transcription regulatory element:
(i) comprises a liver-specific promoter; and/or
(ii) is fewer than 270 nucleotides in length; and/or
(iii) comprises a core nucleotide sequence which comprises or consists of a nucleotide sequence having at least 95% identity to SEQ ID NO: 43, or a sequence which differs from SEQ ID NO: 43 by a single nucleotide, and wherein the transcription regulatory element is between 80 and 280 nucleotides in length; optionally wherein the transcription regulatory element is between 80 and 225 nucleotides in length; and/or
(iv) comprises a core nucleotide sequence which comprises or consists of a sequence having at least 95% identity to SEQ ID NO: 43, or a sequence which differs from SEQ ID NO: 43 by a single nucleotide, wherein the transcription regulatory element:
(a) does not comprise at least 20, at least 30 or at least 40 consecutive nucleotides of SEQ ID NO: 48 and/or
(b) does not comprise at least 20, at least 30 or at least 40 consecutive nucleotides of SEQ ID NO: 49;
and wherein the transcription regulatory element is between 80 and 280 nucleotides in length; and/or
(v) comprises or consists of a sequence which has at least 90% identity, optionally at least 95% identity, or optionally at least 98% identity to SEQ ID NO: 51; and/or
(vi) comprises or consists of a sequence of SEQ ID NO: 51; and/or
(vii) is operably linked to the Factor VIII nucleotide sequence; and/or
(viii) is operably linked to the Factor VIII nucleotide sequence, and wherein the transcription regulatory element expresses the Factor VIII nucleotide sequence at 50% or better, 80% or better or 100% or better compared to a transcription regulatory element defined by SEQ ID NO: 52, optionally wherein expression of the Factor VIII nucleotide sequence is determined in vitro in Huh7 cells.

5. The recombinant AAV construct according to any one of claims 1 to 4, further comprising a nucleotide sequence encoding a signal peptide, optionally wherein:
(I) (i) the signal peptide is a wild-type Factor VIII signal peptide; and/or
(ii) the signal peptide comprises SEQ ID NO: 53 or wherein the nucleotide sequence encoding the signal peptide comprises SEQ ID NO: 54 or 55; or
(II) (i) the signal peptide is not a wild-type Factor VIII signal peptide; and/or
(ii) the Factor VIII polypeptide or fragment thereof encoded by the Factor VIII nucleotide sequence is expressed in plasma at a higher level following administration of the recombinant AAV construct compared to the administration of an equivalent dose of an equivalent recombinant AAV construct which comprises a wild-type Factor VIII signal peptide; and/or
(iii) the Factor VIII polypeptide or fragment thereof encoded by the Factor VIII nucleotide sequence is expressed in plasma at least 1.1 fold, at least 1.2 fold, at least 1.5 fold, at least 1.8 fold, at least 2 fold, at least 5 fold higher compared to the equivalent recombinant AAV construct which comprises a wild-type Factor VIII signal peptide; and/or
(iv) the signal peptide comprises a sequence that is at least 90%, at least 92%, at least 95%, at least 98%, at least 99% or 100% identical to the sequence of any one of SEQ ID NOs: 56, 58 or 60.

6. The recombinant AAV construct according to claim 5, wherein:
(a) the signal peptide comprises SEQ ID NO: 56 or wherein the nucleotide sequence encoding the signal peptide comprises SEQ ID NO: 57; or
(b) the signal peptide comprises SEQ ID NO: 60 or wherein the nucleotide sequence encoding the signal peptide comprises SEQ ID NO: 61; or
(c) the signal peptide comprises SEQ ID NO: 58 or wherein the nucleotide sequence encoding the signal peptide comprises SEQ ID NO: 59.

7. The recombinant AAV construct according to claim 5 or 6, wherein the nucleotide sequence encoding the signal peptide is fewer than 57 nucleotides in length or around 54 nucleotides in length.

8. The recombinant AAV construct according to any one of the preceding claims, further comprising a polyA nucleotide sequence, optionally wherein the polyA nucleotide sequence:
(i) comprises the nucleotide sequence of any one of SEQ ID NOs: 63 to 66; and/or
(ii) is fewer than 50, or around 49 nucleotides in length; and/or
(iii) comprises the nucleotide sequence of SEQ ID NO: 65.

9. The recombinant AAV construct according to any one of the preceding claims, further comprising one or two ITR(s), optionally wherein:
(i) the nucleotide sequence of the or each ITR is fewer than 157, fewer than 154, or around 145 nucleotides in length; and/or
(ii) the or each ITR is a wild-type ITR; and/or
(iii) the or each ITR is an AAV2 ITR; and/or
(iv) the nucleotide sequence of the or each ITR comprises a nucleotide sequence of SEQ ID NO: 67 or SEQ ID NO: 70.

10. The recombinant AAV construct according to any one of the preceding claims, wherein:
(i) the Factor VIII nucleotide sequence encoding the Factor VIII amino acid sequence comprises the sequence of SEQ ID NO: 39 or SEQ ID NO: 75 and the nucleotide sequence encoding the signal peptide comprises the nucleotide sequence of SEQ ID NO: 57; and
(ii) the recombinant AAV construct comprises a transcriptional regulatory element which is a liver-specific promoter, and the liver-specific promoter comprises the nucleotide sequence of SEQ ID NO: 51; and
(iii) the recombinant AAV construct comprises two ITRs and a polyA nucleotide sequence, wherein the nucleotide sequence of each ITR is SEQ ID NO: 67 and/or SEQ ID NO: 70 and the polyA nucleotide sequence comprises the nucleotide sequence of SEQ ID NO: 65.

11. The recombinant AAV construct according to any one of the preceding claims, wherein the recombinant AAV construct comprises or consists of SEQ ID NO:71.

12. The recombinant AAV construct according to any one of the preceding claims, wherein:
(i) vector genome yield is increased when said recombinant AAV construct is used to produce AAV viral particles when compared to the vector genome yield obtained when a comparator recombinant AAV construct which is more than 4900 nucleotides in length is used; and/or
(ii) vector genome yield is increased when said recombinant AAV construct is used to produce AAV viral particles when compared to the vector genome yield obtained when a comparator recombinant AAV construct which is more than 4900 nucleotides in length is used, and the vector genome yield is at least 1.5, at least 2, at least 2.25, at least 2.5, at least 2.75, at least 3, at least 4, or at least 5 fold higher than the vector genome yield obtained when the comparator recombinant AAV construct is used, optionally wherein the vector genome yield is between 1.25 and 3 fold higher, between 1.5 and 3 fold higher, or between 2 and 3 fold higher than the vector genome yield obtained when the comparator recombinant AAV construct is used.

13. The recombinant AAV construct according to any one of the preceding claims, wherein:
(i) vector genome to total particle ratio is increased when said recombinant AAV construct is used to produce AAV viral particles when compared to the vector genome to total particle ratio obtained when a comparator recombinant AAV construct which is more than 4900 nucleotides in length is used; and/or
(ii) vector genome to total particle ratio is increased when said recombinant AAV construct is used to produce AAV viral particles when compared to the vector genome to total particle ratio obtained when a comparator recombinant AAV construct which is more than 4900 nucleotides in length is used, and the vector genome to total particle ratio is at least 1.25, at least 1.5, at least 1.75, at least 2, at least 2.25, at least 2.5, at least 2.75, at least 3, at least 3.25, at least 3.5, at least 4, or at least 5 fold higher than the vector genome to total particle ratio obtained when the comparator recombinant AAV construct is used, optionally wherein the vector genome to total particle ratio is between 1.25 and 4 fold higher, or between 1.5 and 3.5 fold higher than the vector genome to total particle ratio obtained when the comparator recombinant AAV construct is used.

14. The recombinant AAV construct according to any one of the preceding claims, wherein:
(i) nucleic acid impurity level, optionally plasmid-derived impurity level, is decreased when said recombinant AAV construct is used to produce AAV viral particles when compared to the impurity level obtained when a comparator recombinant AAV construct which is more than 4900 nucleotides in length is used; and/or
(ii) nucleic acid impurity level, optionally plasmid-derived impurity level, is decreased when said recombinant AAV construct is used to produce AAV viral particles when compared to the impurity level obtained when a comparator recombinant AAV construct which is more than 4900 nucleotides in length is used, and the nucleic acid impurity level is 85% or lower, 75% or lower, 60% or lower, 50% or lower, 40% or lower, 30% or lower, or 20% or lower than the nucleic acid impurity level obtained when the comparator recombinant AAV construct is used, optionally wherein the nucleic acid impurity level is between 40% and 80%, or between 50% and 70%, or between 15% and 55% of the nucleic acid impurity level obtained when the comparator recombinant AAV construct is used.

15. The recombinant AAV construct according to any one of claims 12 to 14, wherein the comparator recombinant AAV construct is more than 4910, more than 4920, more than 4930, more than 4940, more than 4950, more than 4960, more than 4970, more than 4980, more than 4990, or more than 5000 nucleotides in length, optionally wherein the comparator recombinant AAV construct comprises or consists of SEQ ID NO: 72.

16. A Factor VIII polypeptide comprising a Factor VIII amino acid sequence wherein the Factor VIII amino acid sequence comprises a modified beta domain related (BDR) region which is modified relative to wild-type BDR region, which wild-type BDR region corresponds to the region between positions 713 and 1697 of SEQ ID NO: 1, wherein:
(iii) the modified BDR region comprises a maximum of 88 amino acids, and the Factor VIII polypeptide has a specific activity which is higher than the specific activity of a polypeptide of SEQ ID NO: 7; and/or
(iv) the modified BDR region comprises a maximum of 74 amino acids.

17. The Factor VIII polypeptide according to claim 16, wherein:
(i) the Factor VIII polypeptide has a specific activity which is at least 50%, at least 60%, at least 70%, at least 75%, at least 80%, at least 85%, at least 90%, at least 95%, at least 98%, at least 99%, or at least 100% of the specific activity of a reference wild-type Factor VIII polypeptide, optionally the Factor VIII polypeptide of SEQ ID NO: 1; and/or
(ii) the Factor VIII polypeptide has a specific activity which is higher than the specific activity of a reference wild-type Factor VIII polypeptide, optionally the Factor VIII polypeptide of SEQ ID NO: 1; and/or
(iii) the Factor VIII polypeptide has a specific activity which is at least 1.2 fold, at least 1.5 fold, at least 1.7 fold, at least 1.8 fold, at least 2 fold, at least 2.2 fold, at least 2.5 fold, at least 3 fold, at least 3.5 fold, at least 4 fold, at least 4.5 fold, at least 5 fold, or at least 5.5 fold higher than the specific activity of a reference wild-type Factor VIII, optionally the Factor VIII polypeptide of SEQ ID NO: 1; and/or
(iv) the Factor VIII polypeptide has a specific activity which is at least 50%, at least 60%, at least 70%, at least 75%, at least 80%, at least 85%, at least 90%, at least 95%, at least 98%, at least 99%, or at least 100% of the specific activity of the Factor VIII polypeptide of SEQ ID NO: 7; and/or
(v) the Factor VIII polypeptide has a specific activity which is higher than the specific activity of the Factor VIII polypeptide of SEQ ID NO: 7; and/or
(vi) the Factor VIII polypeptide has a specific activity which is at least 1.2 fold, at least 1.5 fold, at least 1.7 fold, at least 1.8 fold, at least 2 fold, at least 2.2 fold, at least 2.5 fold, at least 3 fold, at least 3.5 fold, at least 4 fold, at least 4.5 fold, at least 5 fold, or at least 5.5 fold higher than the specific activity of the Factor VIII polypeptide of SEQ ID NO: 7; and/or
(vii) the Factor VIII polypeptide has a specific activity which is at least 50%, at least 60%, at least 70%, at least 75%, at least 80%, at least 85%, at least 90%, at least 95%, at least 98%, at least 99%, or at least 100% of the specific activity of the Factor VIII polypeptide of SEQ ID NO: 8; and/or
(viii) the Factor VIII polypeptide has a specific activity which is higher than the specific activity of the Factor VIII polypeptide of SEQ ID NO: 8; and/or
(ix) the Factor VIII polypeptide has a specific activity which is at least 1.2 fold, at least 1.5 fold, at least 1.7 fold, at least 1.8 fold, at least 2 fold, at least 2.2 fold, at least 2.5 fold, at least 3 fold, at least 3.5 fold, at least 4 fold, at least 4.5 fold, at least 5 fold, or at least 5.5 fold higher than the specific activity of the Factor VIII polypeptide of SEQ ID NO: 8; and/or
(x) the Factor VIII polypeptide has a specific activity which is higher than the specific activity of the Factor VIII polypeptide encoded by SEQ ID NO: 37; and/or
(xi) the Factor VIII polypeptide has a specific activity which is higher than the specific activity of the Factor VIII polypeptide encoded by SEQ ID NO: 38; and/or
(xii) the specific activity is measured using a chromogenic assay; and/or
(xiii) the specific activity is measured using a clotting assay, optionally a one-stage clotting assay; and/or
(xiv) the modified BDR region comprises a maximum of 87, 85, 80, 75, 70, 65, 60, 55, 50, or 45 amino acids; and/or
(xv) the modified BDR region comprises a maximum of 74 amino acids; and/or
(xvi) the modified BDR region comprises a maximum of 47 amino acids; and/or
(xvii) the modified BDR region comprises a maximum of 45 amino acids; and/or
(xviii) the modified BDR region consists of between 28 and 48 amino acids; and/or
(xix) the modified BDR region consists of between 30 and 48 amino acids; and/or
(xx) the modified BDR region consists of around 45 amino acids.

18. The Factor VIII polypeptide according to claim 16 or 17, wherein the Factor VIII amino acid sequence:
(i) does not comprise amino acids corresponding to positions 732 to 1669 of SEQ ID NO: 1; and/or
(ii) does not comprise amino acids corresponding to positions 732 to 1669 of SEQ ID NO: 1, and the Factor VIII amino acid sequence comprises amino acids corresponding to positions 724 to 731 of SEQ ID NO: 1; and/or
(iii) does not comprise amino acids corresponding to positions 732 to 1669 of SEQ ID NO: 1, and the Factor VIII amino acid sequence comprises amino acids corresponding to positions 1670 to 1689 of SEQ ID NO: 1; and/or
(iv) does not comprise amino acids corresponding to positions 732 to 1669 of SEQ ID NO: 1, and the Factor VIII amino acid sequence comprises amino acids corresponding to positions 724 to 731 and 1670 to 1689 of SEQ ID NO: 1; and/or
(v) does not comprise amino acids corresponding to positions 732 to 1669 of SEQ ID NO: 1, and the Factor VIII amino acid sequence comprises amino acids corresponding to positions 724 to 731 and 1670 to 1689 of SEQ ID NO: 1 and the tyrosine amino acids corresponding to positions 718, 719 and 723 of SEQ ID NO: 1; and/or
(vi) does not comprise amino acids corresponding to positions 732 to 1669 of SEQ ID NO: 1, and the Factor VIII amino acid sequence comprises amino acids corresponding to positions 714 to 731 and 1670 to 1689 of SEQ ID NO: 1; and/or
(vii) does not comprise amino acids corresponding to positions 732 to 1669 of SEQ ID NO: 1, and the Factor VIII amino acid sequence comprises amino acids corresponding to positions 1 to 731 and 1670 to 2332 of SEQ ID NO: 1; and/or
(viii) comprises SEQ ID NO: 31; and/or
(ix) comprises any one of SEQ ID NOs: 9-36.

19. The Factor VIII polypeptide according to any one of claims 16 to 18, wherein the Factor VIII amino acid sequence comprises one or more substitution mutations at an inter-domain interface selected from the group consisting of:
d. the A1/A3 domain interface;
e. the A2/A3 domain interface; or
f. the A1/C2 domain interface,
wherein:
(iii) the one or more substitution mutations comprises substitution of an amino acid with a more hydrophobic amino acid; or
(iv) the one or more substitution mutations comprises substitution of a pair of amino acids in the respective domains with cysteine residues;
and wherein
(a) the Factor VIII polypeptide has higher specific activity than a reference wild-type Factor VIII polypeptide; and/or
(b) the Factor VIII polypeptide has higher stability than a reference wild-type Factor VIII polypeptide; and/or
(c) the Factor VIII polypeptide is expressed at a higher level in a host cell than a reference wild-type Factor VIII polypeptide.

20. The Factor VIII polypeptide according to any one of claims 16 to 18, wherein the Factor VIII amino acid sequence comprises a one or more substitution mutations selected from the group consisting of:
c. a substitution of an amino acid corresponding to M662 or H693 of SEQ ID NO: 1; or
d. a substitution of a pair of amino acids comprising a first amino acid and a second amino acid with cysteine residues, wherein:
1. the first amino acid corresponds to M147, S149 or S289 of SEQ ID NO: 1 and the second amino acid corresponds to E1969, E1970 or N1977 of SEQ ID NO: 1;
2. the first amino acid corresponds to T667, T669, N684, L687, I689, S695 or F697 of SEQ ID NO: 1 and the second amino acid corresponds to S1791, G1799, A1800, R1803, E1844, S1949, G1981, V1982, or Y1979 of SEQ ID NO: 1; or
3. the first amino acid corresponds to A108, T118 or V137 of SEQ ID NO: 1 and the second amino acid corresponds to N2172, Q2329 or Y2332 of SEQ ID NO: 1.

21. The Factor VIII polypeptide according to claim 19 or 20, wherein the Factor VIII polypeptide:
(i) has higher specific activity relative to a reference wild-type Factor VIII polypeptide; and/or
(ii) has higher stability relative to a reference wild-type Factor VIII polypeptide; and/or
(iii) has higher stability relative to a reference wild-type Factor VIII polypeptide, and the Factor VIII polypeptide has a longer half-life relative to the reference wild-type Factor VIII polypeptide, optionally wherein the Factor VIII polypeptide has a longer half-life relative to the reference wild-type Factor VIII polypeptide when activated; and/or
(iv) is expressed at a higher level in a host cell than a reference wild-type Factor VIII polypeptide.

22. The Factor VIII polypeptide according to any one of claims 19 to 21, wherein the Factor VIII polypeptide has higher specific activity and/or higher stability and/or is expressed at a higher level in a host cell than a reference Factor VIII polypeptide which comprises the Factor VIII amino acid sequence of the Factor VIII polypeptide but which does not comprise the one or more substitution mutations, optionally wherein the reference Factor VIII polypeptide is the Factor VIII polypeptide of SEQ ID NO: 1, 3 or 5.

23. The Factor VIII polypeptide according to any one of claim 19, 21 or 22, wherein the amino acid substituted with a more hydrophobic amino acid is methionine corresponding to the amino acid at position 662 of SEQ ID NO: 1 or histidine corresponding to the amino acid at position 693 of SEQ ID NO: 1.

24. The Factor VIII polypeptide according to any one of claims 19 to 24, wherein:
(i) the one or more substitution mutation does not comprise the M662C substitution; and/or
(ii) a. the one or more substitution mutations comprises substitution of methionine with tyrosine, isoleucine, leucine, phenylalanine or tryptophan; and/or b. the one or more substitution mutations comprises substitution of histidine with glutamate, cysteine, valine, methionine, tyrosine, isoleucine, leucine, phenylalanine or tryptophan; and/or
(iii) the one or more substitution mutations comprises substitution of an amino acid with an aromatic amino acid; and/or
(iv) the one or more substitution mutations comprises the M662W substitution; and/or
(v) the one or more substitution mutations comprises the H693W or H693Y substitution; and/or
(vi) the one or more substitution mutations comprises the M662W and H693W substitutions; and/or
(vii) the one or more substitution mutations comprises substitution of a pair of amino acids in the respective domains with cysteine residues, wherein the cysteine residues form a disulphide bond between the respective domains.

25. The Factor VIII polypeptide according to any one of claims 16 to 24, wherein the Factor VIII amino acid sequence comprises the amino acid sequence set forth in SEQ ID NO: 77, or an amino acid sequence that is at least 90%, at least 95%, at least 96%, at least 97%, at least 98%, at least 99% or 100% identical to the amino acid sequence set forth in SEQ ID NO: 77.

26. A polynucleotide comprising a Factor VIII nucleotide sequence, wherein the Factor VIII nucleotide sequence encodes a Factor VIII polypeptide and wherein at least a portion of the Factor VIII nucleotide sequence is not wild-type.

27. The polynucleotide of claim 26, wherein the Factor VIII polypeptide comprises a Factor VIII amino acid sequence.

28. The polynucleotide according to claim 26 or 27, wherein the Factor VIII nucleotide sequence encodes the Factor VIII polypeptide according to any one of claims 16 to 25.

29. The polynucleotide according to any one of claims 26 to 28, wherein the portion of the Factor VIII nucleotide sequence that is not wild-type is codon-optimised.

30. The polynucleotide according to claim 29, wherein, in the portion of the Factor VIII amino acid sequence that is codon-optimised, at least 50%, at least 55%, at least 60%, at least 61%, at least 62%, at least 63%, at least 64%, at least 65%, at least 69%, at least 70%, at least 75%, or at least 78% of the codons are selected from the group consisting of: TTC, CTG, ATC, GTG, TCC, AGT, AGC, CCT, CCC, ACC, ACA, GCC, TAC, CAC, CAG, AAC, AAG, GAC, GAG, TGT, AGA, and GGC.

31. The polynucleotide according to any one of claims 26 to 30, wherein:
(i) the Factor VIII polypeptide encoded by the Factor VIII nucleotide sequence is expressed in human liver cells at higher levels compared to a reference wild-type Factor VIII nucleotide sequence, optionally wherein the reference wild-type Factor VIII nucleotide sequence is the Factor VIII nucleotide sequence of SEQ ID NO: 2; and/or
(ii) the Factor VIII polypeptide encoded by the Factor VIII nucleotide sequence is expressed in human liver cells at least 1.1 fold, at least 1.2 fold, at least 1.5 fold, at least 1.8 fold, at least 2 fold, at least 5 fold, at least 10 fold, at least 20 fold, at least 30 fold, at least 40 fold, or at least 50 fold higher compared to a reference wild-type Factor VIII nucleotide sequence, optionally wherein the reference wild-type Factor VIII nucleotide sequence is the Factor VIII nucleotide sequence of SEQ ID NO: 2.

32. The polynucleotide according to any one of claims 26 to 31, wherein the Factor VIII polypeptide encoded by the Factor VIII nucleotide sequence is expressed in human liver cells at at least 50%, at least 60%, at least 70%, at least 75%, at least 80%, at least 85%, at least 90%, at least 95%, at least 98%, at least 99%, or at least 100% of the level expressed by a polypeptide encoded by the polynucleotide of:
(i) SEQ ID NO: 3; and/or.
(ii) SEQ ID NO: 4; and/or
(iii) SEQ ID NO: 5; and/or
(iv) SEQ ID NO: 6.

33. The polynucleotide according to any one of claims 27 to 32, wherein the Factor VIII nucleotide sequence encoding the Factor VIII amino acid sequence comprises:
(i) a sequence that is at least 85.5%, at least 86.0%, at least 88%, at least 90%, at least 92%, at least 95%, at least 98%, at least 99% or 100% identical to the portion of SEQ ID NO: 3 which encodes the Factor VIII amino acid sequence; and/or
(ii) a sequence that is at least 85.5%, at least 86.0%, at least 88%, at least 90%, at least 92%, at least 95%, at least 98%, at least 99% or 100% identical to SEQ ID NO: 3; and/or
(iii) the sequence of SEQ ID NO: 3; and/or
(iv) a sequence that is at least 85.0%, at least 85.5%, at least 86.0%, at least 88%, at least 90%, at least 92%, at least 95%, at least 98%, at least 99% or 100% identical to the portion of SEQ ID NO: 4 which encodes the Factor VIII amino acid sequence; and/or
(v) a sequence that is at least 85.0%, at least 85.5%, at least 86.0%, at least 88%, at least 90%, at least 92%, at least 95%, at least 98%, at least 99% or 100% identical to SEQ ID NO: 4; and/or
(vi) the sequence of SEQ ID NO: 4; and/or
(vii) a sequence that is at least 85.0%, at least 85.5%, at least 86.0%, at least 88%, at least 90%, at least 92%, at least 95%, at least 98%, at least 99% or 100% identical to the portion of SEQ ID NO: 5 which encodes the Factor VIII amino acid sequence; and/or
(viii) a sequence that is at least 85.0%, at least 85.5%, at least 86.0%, at least 88%, at least 90%, at least 92%, at least 95%, at least 98%, at least 99% or 100% identical to SEQ ID NO: 5; and/or
(ix) the sequence of SEQ ID NO: 5; and/or
(x) a sequence that is at least 86.5%, at least 87.0%, at least 87.5%, at least 88.0%, at least 90%, at least 92%, at least 95%, at least 98%, at least 99% or 100% identical to the portion of SEQ ID NO: 6 which encodes the Factor VIII amino acid sequence; and/or
(xi) a sequence that is at least 86.5%, at least 87.0%, at least 87.5%, at least 88.0%, at least 90%, at least 92%, at least 95%, at least 98%, at least 99% or 100% identical to SEQ ID NO: 6; and/or
(xii) the sequence of SEQ ID NO: 6.

34. The polynucleotide according to any one of claims 27 to 33, wherein the Factor VIII nucleotide sequence encoding the Factor VIII amino acid sequence comprises the sequence of SEQ ID NO: 39, SEQ ID NO: 40, SEQ ID NO: 41, or SEQ ID NO: 42, preferably SEQ ID NO: 39.

35. The polynucleotide according to any one of claims 26 to 34, wherein the Factor VIII nucleotide encodes a Factor VIII amino acid sequence as defined in any one of claims 19 to 25.

36. The polynucleotide according to claim 35, wherein the Factor VIII nucleotide sequence encoding the Factor VIII amino acid sequence comprises:
(i) a nucleotide sequence that is at least 85%, at least 90%, at least 95%, at least 96%, at least 97%, at least 98%, at least 99% or 100% identical to the nucleotide sequence set forth in SEQ ID NO: 76, or a nucleotide sequence that is at least 85%, at least 90%, at least 95%, at least 96%, at least 97%, at least 98%, at least 99% or 100% identical to a nucleotide sequence comprising at least 4047 nucleotides of SEQ ID NO: 76; and/or
(ii) the nucleotide sequence set forth in SEQ ID NO:75 or a nucleotide sequence that is at least 85%, at least 90%, at least 95%, at least 96%, at least 97%, at least 98%, at least 99% or 100% identical to the nucleotide sequence set forth in SEQ ID NO:75.

37. A recombinant AAV construct which comprises a polynucleotide comprising a Factor VIII nucleotide sequence, wherein the Factor VIII nucleotide sequence encodes a Factor VIII polypeptide comprising a Factor VIII amino acid sequence.

38. The recombinant AAV construct according to any one of claim 1 to 15 or 37, wherein the Factor VIII polypeptide is the Factor VIII polypeptide according to any one of claims 16 to 25.

39. The recombinant AAV construct according to any one of claim 1 to 15, 37 or 38, wherein the polynucleotide is the polynucleotide according to any one of claims 26 to 36.

40. A Factor VIII polypeptide encoded by the polynucleotide or recombinant AAV construct according to any one of claims 1 to 15 or 26 to 39.

41. An AAV viral particle comprising the recombinant AAV construct according to any one of claims 1 to 15 or 37 to 39.

42. The AAV viral particle according to claim 41, wherein the viral particle comprises a capsid, optionally wherein the capsid is selected from the group consisting of:
(i) a capsid comprising a sequence which is at least 96%, at least 98%, at least 99%, at least 99.5%, at least 99.8% or 100% identity to SEQ ID NO: 68;
(ii) a capsid comprising a sequence which is at least 96%, at least 98%, at least 99%, at least 99.5%, at least 99.8%, or 100% identity to SEQ ID NO: 69;
(iii) a liver-tropic capsid; and
(iv) an AAVS capsid.

43. The recombinant AAV construct or AAV viral particle according to any one of claims 1 to 15 or 37 to 42, wherein the activity of the polypeptide encoded by the Factor VIII nucleotide sequence achieved:
(i) is higher following administration of the recombinant AAV construct or AAV viral particle compared to the administration of an equivalent dose of an equivalent recombinant AAV construct or AAV viral particle which comprises the AAV construct of SEQ ID NO: 1 of WO 2017/053677 (SEQ ID NO: 72); and/or
(ii) is at least 1.1 fold, at least 1.2 fold, at least 1.5 fold, at least 1.8 fold, at least 2 fold, or at least 5 fold higher compared to the equivalent recombinant AAV construct or AAV viral particle which comprises the AAV construct of SEQ ID NO: 1 of WO 2017/053677 (SEQ ID NO: 72).

44. A composition comprising the Factor VIII polypeptide, polynucleotide, recombinant AAV construct or AAV viral particle according to any one of claims 1 to 43, and a pharmaceutically acceptable excipient.

45. The Factor VIII polypeptide, polynucleotide, recombinant AAV construct, AAV viral particle or composition according to any one of claims 1 to 44 for use in a method of treatment.

46. The Factor VIII polypeptide, polynucleotide, recombinant AAV construct, AAV viral particle or composition for use according to claim 45, wherein the method of treatment comprises administering an effective amount of the Factor VIII polypeptide, polynucleotide, recombinant AAV construct or AAV viral particle of any one of claims 1 to 44 to a patient.

47. A method of treatment comprising administering an effective amount of the Factor VIII polypeptide, polynucleotide, recombinant AAV construct, AAV viral particle or composition according to any one of claims 1 to 44 to a patient.

48. Use of the Factor VIII polypeptide, polynucleotide, recombinant AAV construct, AAV viral particle or composition according to any one of claims 1 to 44 in the manufacture of a medicament for use in a method of treatment.

49. The use according to claim 48 wherein the method of treatment comprises administering an effective amount of the Factor VIII polypeptide, polynucleotide, recombinant AAV construct, AAV viral particle or composition according to any one of claims 1 to 44 to a patient.

50. The Factor VIII polypeptide, polynucleotide, recombinant AAV construct, AAV viral particle, composition, method or use according to any one of claims 45 to 49, wherein the method of treatment is a method of treating haemophilia, optionally wherein the haemophilia is haemophilia A.

51. Use of the recombinant AAV construct as defined in any one of claims 1 to 15 or 37 to 39 for producing a population of AAV viral particles.

52. The use according to claim 51, wherein the AAV construct is less than 4900 nucleotides in length, wherein the population of AAV viral particles:
d) has an increased vector genome yield when compared to the vector genome yield obtained when a comparator recombinant AAV construct is used;
e) has an increased vector genome to total particle ratio when compared to the vector genome to total particle ratio obtained when a comparator recombinant AAV construct is used; and/or
f) has a decreased nucleic acid impurity level when compared to the nucleic acid impurity level obtained when a comparator recombinant AAV construct is used;
wherein the comparator recombinant AAV construct is more than 4900 nucleotides in length.

53. Use of a recombinant AAV construct as defined in any one of claim 1 to 15, 38 or 39 for:
d) increasing the vector genome yield during AAV viral particle production when compared to the vector genome yield obtained when a comparator recombinant AAV construct is used;
e) increasing the vector genome to total particle ratio during AAV viral particle production when compared to the vector genome to total particle ratio obtained when a comparator recombinant AAV construct is used; and/or
f) decreasing the nucleic acid impurity level during AAV viral particle production when compared to the nucleic acid impurity level obtained when a comparator recombinant AAV construct is used;
wherein the comparator recombinant AAV construct is more than 4900 nucleotides in length.

54. The use according to claim 52 or 53, wherein:
(i) the vector genome yield is at least 1.5, at least 2, at least 2.25, at least 2.5, at least 2.75, at least 3, at least 4, or at least 5 fold higher than the vector genome yield obtained when the comparator recombinant AAV construct is used, optionally wherein the vector genome yield is between 1.25 and 3 fold higher, between 1.5 and 3 fold higher, or between 2 and 3 fold higher than the vector genome yield obtained when the comparator recombinant AAV construct is used; and/or
(ii) the vector genome to total particle ratio is at least 1.25, at least 1.5, at least 1.75, at least 2, at least 2.25, at least 2.5, at least 2.75, at least 3, at least 3.25, at least 3.5, at least 4, or at least 5 fold higher than the vector genome to total particle ratio obtained when the comparator recombinant AAV construct is used, optionally wherein the vector genome to total particle ratio is between 1.25 and 4 fold higher, or between 1.5 and 3.5 fold higher than the vector genome to total particle ratio obtained when the comparator recombinant AAV construct is used; and/or
(iii) nucleic acid impurity level is 85% or lower, 75% or lower, 60% or lower, 50% or lower, 40% or lower, 30% or lower, or 20% or lower than the nucleic acid impurity level obtained when the comparator recombinant AAV construct is used, optionally wherein the nucleic acid impurity level is between 40% and 80%, between 50% and 70%, or between 15% and 55% of the nucleic acid impurity level obtained when the comparator recombinant AAV construct is used.

55. A method for producing a population of AAV viral particles comprising:
a) obtaining the recombinant AAV construct as defined in any one of claims 1 to 15 or 37 to 39;
b) transfecting a host cell with the said recombinant AAV construct; and
c) culturing the host cell under conditions suitable for AAV viral particle production.

56. A method for increasing the vector genome yield during the production of a population of AAV viral particles, comprising:
a) obtaining the recombinant AAV construct as defined in any one of claim 1 to 15, 38 or 39;
b) transfecting a host cell with the said recombinant AAV construct; and
c) culturing the host cell under conditions suitable for AAV viral particle production;
wherein the vector genome yield is increased when compared to the vector genome yield obtained when a comparator recombinant AAV construct of more than 4900 nucleotides in length is used.

57. A method for increasing the vector genome to total particle ratio during the production of a population of AAV viral particles, comprising:
a) obtaining the recombinant AAV construct as defined in any one of claim 1 to 15, 38 or 39;
b) transfecting a host cell with the said recombinant AAV construct; and
c) culturing the host cell under conditions suitable for AAV viral particle production;
wherein the vector genome to total particle ratio is increased when compared to the vector genome to total particle ratio obtained when a comparator recombinant AAV construct of more than 4900 nucleotides in length is used.

58. A method for decreasing the nucleic acid impurity level during the production of a population of AAV viral particles, comprising:
a) obtaining the recombinant AAV construct as defined in any one of claim 1 to 15, 38 or 39;
b) transfecting a host cell with the said recombinant AAV construct; and
c) culturing the host cell under conditions suitable for AAV viral particle production;
wherein the nucleic acid impurity level is decreased when compared to the nucleic acid impurity level obtained when a comparator recombinant AAV construct of more than 4900 nucleotides in length is used.

59. The method or use according to any one of claims 52 to 54 or 56 to 58, wherein the comparator is more than 4910, more than 4920, more than 4930, more than 4940, more than 4950, more than 4960, more than 4970, more than 4980, more than 4990, or more than 5000 nucleotides in length, optionally wherein the comparator comprises or consists of SEQ ID NO: 72.

60. A population of AAV viral particles obtained or obtainable by the method of any one of claims 55 to 59.

The application's sequence listing, which the Patent Office published only in electronic form, follows.

SEQUENCE LISTING (124 sequences)

SEQ ID NO: 1 - protein, 2332 aa, Homo sapiens
ATRRYYLGAVELSWDYMQSDLGELPVDARFPPRVPKSFPFNTSVVYKKTLFVEFTDHLFNIAKPRPPWMGLLGPTIQAEVYDTVVITLKNMASHPVSLHAVGVSYWKASEGAEYDDQTSQREKEDDKVFPGGSHTYVWQVLKENGPMASDPLCLTYSYLSHVDLVKDLNSGLIGALLVCREGSLAKEKTQTLHKFILLFAVFDEGKSWHSETKNSLMQDRDAASARAWPKMHTVNGYVNRSLPGLIGCHRKSVYWHVIGMGTTPEVHSIFLEGHTFLVRNHRQASLEISPITFLTAQTLLMDLGQFLLFCHISSHQHDGMEAYVKVDSCPEEPQLRMKNNEEAEDYDDDLTDSEMDVVRFDDDNSPSFIQIRSVAKKHPKTWVHYIAAEEEDWDYAPLVLAPDDRSYKSQYLNNGPQRIGRKYKKVRFMAYTDETFKTREAIQHESGILGPLLYGEVGDTLLIIFKNQASRPYNIYPHGITDVRPLYSRRLPKGVKHLKDFPILPGEIFKYKWTVTVEDGPTKSDPRCLTRYYSSFVNMERDLASGLIGPLLICYKESVDQRGNQIMSDKRNVILFSVFDENRSWYLTENIQRFLPNPAGVQLEDPEFQASNIMHSINGYVFDSLQLSVCLHEVAYWYILSIGAQTDFLSVFFSGYTFKHKMVYEDTLTLFPFSGETVFMSMENPGLWILGCHNSDFRNRGMTALLKVSSCDKNTGDYYEDSYEDISAYLLSKNNAIEPRSFSQNSRHPSTRQKQFNATTIPENDIEKTDPWFAHRTPMPKIQNVSSSDLLMLLRQSPTPHGLSLSDLQEAKYETFSDDPSPGAIDSNNSLSEMTHFRPQLHHSGDMVFTPESGLQLRLNEKLGTTAATELKKLDFKVSSTSNNLISTIPSDNLAAGTDNTSSLGPPSMPVHYDSQLDTTLFGKKSSPLTESGGPLSLSEENNDSKLLESGLMNSQESSWGKNVSSTESGRLFKGKRAHGPALLTKDNALFKVSISLLKTNKTSNNSATNRKTHIDGPSLLIENSPSVWQNILESDTEFKKVTPLIHDRMLMDKNATALRLNHMSNKTTSSKNMEMVQQKKEGPIPPDAQNPDMSFFKMLFLPESARWIQRTHGKNSLNSGQGPSPKQLVSLGPEKSVEGQNFLSEKNKVVVGKGEFTKDVGLKEMVFPSSRNLFLTNLDNLHENNTHNQEKKIQEEIEKKETLIQENVVLPQIHTVTGTKNFMKNLFLLSTRQNVEGSYDGAYAPVLQDFRSLNDSTNRTKKHTAHFSKKGEEENLEGLGNQTKQIVEKYACTTRISPNTSQQNFVTQRSKRALKQFRLPLEETELEKRIIVDDTSTQWSKNMKHLTPSTLTQIDYNEKEKGAITQSPLSDCLTRSHSIPQANRSPLPIAKVSSFPSIRPIYLTRVLFQDNSSHLPAASYRKKDSGVQESSHFLQGAKKNNLSLAILTLEMTGDQREVGSLGTSATNSVTYKKVENTVLPKPDLPKTSGKVELLPKVHIYQKDLFPTETSNGSPGHLDLVEGSLLQGTEGAIKWNEANRPGKVPFLRVATESSAKTPSKLLDPLAWDNHYGTQIPKEEWKSQEKSPEKTAFKKKDTILSLNACESNHAIAAINEGQNKPEIEVTWAKQGRTERLCSQNPPVLKRHQREITRTTLQSDQEEIDYDDTISVEMKKEDFDIYDEDENQSPRSFQKKTRHYFIAAVERLWDYGMSSSPHVLRNRAQSGSVPQFKKVVFQEFTDGSFTQPLYRGELNEHLGLLGPYIRAEVEDNIMVTFRNQASRPYSFYSSLISYEEDQRQGAEPRKNFVKPNETKTYFWKVQHHMAPTKDEFDCKAWAYFSDVDLEKDVHSGLIGPLLVCHTNTLNPAHGRQVTVQEFALFFTIFDETKSWYFTENMERNCRAPCNIQMEDPTFKENYRFHAINGYIMDTLPGLVMAQDQRIRWYLLSMGSNENIHSIHFSGHVFTVRKKEEYKMALYNLYPGVFETVEMLPSKAGIWRVECLIGEHLHAGMSTLFLVYSNKCQTPLGMASGHIRDFQITASGQYGQWAPKLARLHYSGSINAWSTKEPFSWIKVDLLAPMIIHGIKTQGARQKFSSLYISQFIIMYSLDGKKWQTYRGNSTGTLMVFFGNVDSSGIKHNIFNPPIIARYIRLHPTHYSIRSTLRMELMGCDLNSCSMPLGMESKAISDAQITASSYFTNMFATWSPSKARLHLQGRSNAWRPQVNNPKEWLQVDFQKTMKVTGVTTQGVKSLLTSMYVKEFLISSSQDGHQWTLFFQNGKVKVFQGNQDSFTPVVNSLDPPLLTRYLRIHPQSWVHQIALRMEVLGCEAQDLY

SEQ ID NO: 2 - DNA, 6996 bp, Homo sapiens
gccaccagaagatactacctgggtgcagtggaactgtcatgggactatatgcaaagtgatctcggtgagctgcctgtggacgcaagatttcctcctagagtgccaaaatcttttccattcaacacctcagtcgtgtacaaaaagactctgtttgtagaattcacggatcaccttttcaacatcgctaagccaaggccaccctggatgggtctgctaggtcctaccatccaggctgaggtttatgatacagtggtcattacacttaagaacatggcttcccatcctgtcagtcttcatgctgttggtgtatcctactggaaagcttctgagggagctgaatatgatgatcagaccagtcaaagggagaaagaagatgataaagtcttccctggtggaagccatacatatgtctggcaggtcctgaaagagaatggtccaatggcctctgacccactgtgccttacctactcatatctttctcatgtggacctggtaaaagacttgaattcaggcctcattggagccctactagtatgtagagaagggagtctggccaaggaaaagacacagaccttgcacaaatttatactactttttgctgtatttgatgaagggaaaagttggcactcagaaacaaagaactccttgatgcaggatagggatgctgcatctgctcgggcctggcctaaaatgcacacagtcaatggttatgtaaacaggtctctgccaggtctgattggatgccacaggaaatcagtctattggcatgtgattggaatgggcaccactcctgaagtgcactcaatattcctcgaaggtcacacatttcttgtgaggaaccatcgccaggcgtccttggaaatctcgccaataactttccttactgctcaaacactcttgatggaccttggacagtttctactgttttgtcatatctcttcccaccaacatgatggcatggaagcttatgtcaaagtagacagctgtccagaggaaccccaactacgaatgaaaaataatgaagaagcggaagactatgatgatgatcttactgattctgaaatggatgtggtcaggtttgatgatgacaactctccttcctttatccaaattcgctcagttgccaagaagcatcctaaaacttgggtacattacattgctgctgaagaggaggactgggactatgctcccttagtcctcgcccccgatgacagaagttataaaagtcaatatttgaacaatggccctcagcggattggtaggaagtacaaaaaagtccgatttatggcatacacagatgaaacctttaagactcgtgaagctattcagcatgaatcaggaatcttgggacctttactttatggggaagttggagacacactgttgattatatttaagaatcaagcaagcagaccatataacatctaccctcacggaatcactgatgtccgtcctttgtattcaaggagattaccaaaaggtgtaaaacatttgaaggattttccaattctgccaggagaaatattcaaatataaatggacagtgactgtagaagatgggccaactaaatcagatcctcggtgcctgacccgctattactctagtttcgttaatatggagagagatctagcttcaggactcattggccctctcctcatctgctacaaagaatctgtagatcaaagaggaaaccagataatgtcagacaagaggaatgtcatcctgttttctgtatttgatgagaaccgaagctggtacctcacagagaatatacaacgctttctccccaatccagctggagtgcagcttgaggatccagagttccaagcctccaacatcatgcacagcatcaatggctatgtttttgatagtttgcagttgtcagtttgtttgcatgaggtggcatactggtacattctaagcattggagcacagactgacttcctttctgtcttcttctctggatataccttcaaacacaaaatggtctatgaagacacactcaccctattcccattctcaggagaaactgtcttcatgtcgatggaaaacccaggtctatggattctggggtgccacaactcagactttcggaacagaggcatgaccgccttactgaaggtttctagttgtgacaagaacactggtgattattacgaggacagttatgaagatatttcagcatacttgctgagtaaaaacaatgccattgaaccaagaagcttctcccagaattcaagacaccctagcactaggcaaaagcaatttaatgccaccacaattccagaaaatgacatagagaagactgacccttggtttgcacacagaacacctatgcctaaaatacaaaatgtctcctctagtgatttgttgatgctcttgcgacagagtcctactccacatgggctatccttatctgatctccaagaagccaaatatgagactttttctgatgatccatcacctggagcaatagacagtaataacagcctgtctgaaatgacacacttcaggccacagctccatcacagtggggacatggtatttacccctgagtcaggcctccaattaagattaaatgagaaactggggacaactgcagcaacagagttgaagaaacttgatttcaaagtttctagtacatcaaataatctgatttcaacaattccatcagacaatttggcagcaggtactgataatacaagttccttaggacccccaagtatgccagttcattatgatagtcaattagataccactctatttggcaaaaagtcatctccccttactgagtctggtggacctctgagcttgagtgaagaaaataatgattcaaagttgttagaatcaggtttaatgaatagccaagaaagttcatggggaaaaaatgtatcgtcaacagagagtggtaggttatttaaagggaaaagagctcatggacctgctttgttgactaaagataatgccttattcaaagttagcatctctttgttaaagacaaacaaaacttccaataattcagcaactaatagaaagactcacattgatggcccatcattattaattgagaatagtccatcagtctggcaaaatatattagaaagtgacactgagtttaaaaaagtgacacctttgattcatgacagaatgcttatggacaaaaatgctacagctttgaggctaaatcatatgtcaaataaaactacttcatcaaaaaacatggaaatggtccaacagaaaaaagagggccccattccaccagatgcacaaaatccagatatgtcgttctttaagatgctattcttgccagaatcagcaaggtggatacaaaggactcatggaaagaactctctgaactctgggcaaggccccagtccaaagcaattagtatccttaggaccagaaaaatctgtggaaggtcagaatttcttgtctgagaaaaacaaagtggtagtaggaaagggtgaatttacaaaggacgtaggactcaaagagatggtttttccaagcagcagaaacctatttcttactaacttggataatttacatgaaaataatacacacaatcaagaaaaaaaaattcaggaagaaatagaaaagaaggaaacattaatccaagagaatgtagttttgcctcagatacatacagtgactggcactaagaatttcatgaagaaccttttcttactgagcactaggcaaaatgtagaaggttcatatgacggggcatatgctccagtacttcaagattttaggtcattaaatgattcaacaaatagaacaaagaaacacacagctcatttctcaaaaaaaggggaggaagaaaacttggaaggcttgggaaatcaaaccaagcaaattgtagagaaatatgcatgcaccacaaggatatctcctaatacaagccagcagaattttgtcacgcaacgtagtaagagagctttgaaacaattcagactcccactagaagaaacagaacttgaaaaaaggataattgtggatgacacctcaacccagtggtccaaaaacatgaaacatttgaccccgagcaccctcacacagatagactacaatgagaaggagaaaggggccattactcagtctcccttatcagattgccttacgaggagtcatagcatccctcaagcaaatagatctccattacccattgcaaaggtatcatcatttccatctattagacctatatatctgaccagggtcctattccaagacaactcttctcatcttccagcagcatcttatagaaagaaagattctggggtccaagaaagcagtcatttcttacaaggagccaaaaaaaataacctttctttagccattctaaccttggagatgactggtgatcaaagagaggttggctccctggggacaagtgccacaaattcagtcacatacaagaaagttgagaacactgttctcccgaaaccagacttgcccaaaacatctggcaaagttgaattgcttccaaaagttcacatttatcagaaggacctattccctacggaaactagcaatgggtctcctggccatctggatctcgtggaagggagccttcttcagggaacagagggagcgattaagtggaatgaagcaaacagacctggaaaagttccctttctgagagtagcaacagaaagctctgcaaagactccctccaagctattggatcctcttgcttgggataaccactatggtactcagataccaaaagaagagtggaaatcccaagagaagtcaccagaaaaaacagcttttaagaaaaaggataccattttgtccctgaacgcttgtgaaagcaatcatgcaatagcagcaataaatgagggacaaaataagcccgaaatagaagtcacctgggcaaagcaaggtaggactgaaaggctgtgctctcaaaacccaccagtcttgaaacgccatcaacgggaaataactcgtactactcttcagtcagatcaagaggaaattgactatgatgataccatatcagttgaaatgaagaaggaagattttgacatttatgatgaggatgaaaatcagagcccccgcagctttcaaaagaaaacacgacactattttattgctgcagtggagaggctctgggattatgggatgagtagctccccacatgttctaagaaacagggctcagagtggcagtgtccctcagttcaagaaagttgttttccaggaatttactgatggctcctttactcagcccttataccgtggagaactaaatgaacatttgggactcctggggccatatataagagcagaagttgaagataatatcatggtaactttcagaaatcaggcctctcgtccctattccttctattctagccttatttcttatgaggaagatcagaggcaaggagcagaacctagaaaaaactttgtcaagcctaatgaaaccaaaacttacttttggaaagtgcaacatcatatggcacccactaaagatgagtttgactgcaaagcctgggcttatttctctgatgttgacctggaaaaagatgtgcactcaggcctgattggaccccttctggtctgccacactaacacactgaaccctgctcatgggagacaagtgacagtacaggaatttgctctgtttttcaccatctttgatgagaccaaaagctggtacttcactgaaaatatggaaagaaactgcagggctccctgcaatatccagatggaagatcccacttttaaagagaattatcgcttccatgcaatcaatggctacataatggatacactacctggcttagtaatggctcaggatcaaaggattcgatggtatctgctcagcatgggcagcaatgaaaacatccattctattcatttcagtggacatgtgttcactgtacgaaaaaaagaggagtataaaatggcactgtacaatctctatccaggtgtttttgagacagtggaaatgttaccatccaaagctggaatttggcgggtggaatgccttattggcgagcatctacatgctgggatgagcacactttttctggtgtacagcaataagtgtcagactcccctgggaatggcttctggacacattagagattttcagattacagcttcaggacaatatggacagtgggccccaaagctggccagacttcattattccggatcaatcaatgcctggagcaccaaggagcccttttcttggatcaaggtggatctgttggcaccaatgattattcacggcatcaagacccagggtgcccgtcagaagttctccagcctctacatctctcagtttatcatcatgtatagtcttgatgggaagaagtggcagacttatcgaggaaattccactggaaccttaatggtcttctttggcaatgtggattcatctgggataaaacacaatatttttaaccctccaattattgctcgatacatccgtttgcacccaactcattatagcattcgcagcactcttcgcatggagttgatgggctgtgatttaaatagttgcagcatgccattgggaatggagagtaaagcaatatcagatgcacagattactgcttcatcctactttaccaatatgtttgccacctggtctccttcaaaagctcgacttcacctccaagggaggagtaatgcctggagacctcaggtgaataatccaaaagagtggctgcaagtggacttccagaagacaatgaaagtcacaggagtaactactcagggagtaaaatctctgcttaccagcatgtatgtgaaggagttcctcatctccagcagtcaagatggccatcagtggactctcttttttcagaatggcaaagtaaaggtttttcagggaaatcaagactccttcacacctgtggtgaactctctagacccaccgttactgactcgctaccttcgaattcacccccagagttgggtgcaccagattgccctgaggatggaggttctgggctgcgaggcacaggacctctac

SEQ ID NO: 3 - DNA, 4314 bp, Artificial sequence
  codon optimised sequence of a Factor VIII deletion variant
gctactagaagatattatcttggggcagtggagctgagctgggactacatgcagtctgacctgggagaactgcctgtggatgccagatttccccctcgagtgcccaagagcttcccctttaacacctcagtggtgtacaagaagaccctgtttgtggagtttacagaccatctcttcaacattgctaagcccagacctccctggatgggcctgctgggccctaccatccaagctgaagtgtatgacactgttgtgatcacactcaagaacatggcctcccatcctgtgtccctgcatgcagtgggagtctcctactggaaggcctcagaaggagcagagtatgatgaccagaccagccagagagagaaggaggatgacaaggtgtttcctggagggagccacacctatgtgtggcaggtgctgaaggagaatggacctatggccagtgaccctctgtgtcttacctattcctacctgtcacatgtggatctggtgaaggacctgaacagtggcctgattggggctctgctggtttgcagagaaggcagcttggccaaggagaagacccaaaccctgcacaagttcatcctgctgtttgctgtgtttgatgaggggaaatcatggcactcagagaccaagaacagcctcatgcaggatagggatgctgccagtgccagggcttggcccaagatgcacactgtgaatggctatgtgaatagaagcctgcctgggctgataggctgtcacagaaaatctgtgtactggcatgtgattggcatgggcaccacacctgaggtgcactccattttcctggagggccacaccttccttgtgagaaaccacagacaagcttccctggagatcagcccaatcacctttctgactgctcaaaccctcctgatggatctgggccagttcctgctgttctgtcatatctcctcacaccagcatgatggaatggaagcttatgtcaaggtggactcctgcccagaggaaccacagctcagaatgaagaacaatgaggaggctgaggactatgatgatgacctgacagactctgaaatggatgtggtcagatttgatgatgacaacagcccttcattcatccaaatcagatctgtggccaagaagcatcccaagacctgggtgcactacatagctgctgaggaggaggactgggactatgcccctctggtcctggcccctgatgacagaagctataaaagccagtacctgaataatggcccccagagaattggcagaaagtacaagaaagtcagattcatggcttacactgatgagaccttcaaaaccagggaagccatccagcatgagtcaggcatcctgggccccctgctgtatggggaggttggagataccctgctgattatcttcaaaaaccaggcaagcaggccctacaatatctaccctcatggcatcactgatgtcaggccactgtattccagaagactgcctaagggggtgaagcacctgaaggacttcccaatcctgccaggggagattttcaaatacaagtggacagtgactgtggaggatggaccaaccaagtcagatcctagatgtctgaccagatactactccagctttgtgaacatggagagagacctggcctctggcctgattggccctctgctgatctgctataaagagtcagtggaccagagaggcaaccagatcatgagtgacaaaagaaatgtgatcttgttctcagtgtttgatgagaatagatcttggtacctcacagaaaacatccagaggttcctgcccaatccagctggggtgcagctggaagatccagaattccaggccagcaacatcatgcatagcatcaatggttatgtctttgacagcctgcagctgtcagtgtgtctgcatgaagttgcttactggtatattctgtccattggagcccagacagacttcctgtctgtcttcttctctggctacacctttaaacacaagatggtgtatgaggacaccctgaccctgttccctttctctggggaaacagtgttcatgtccatggaaaaccctggactgtggatcctgggctgccataacagtgacttcagaaacagaggcatgacagccctgctcaaggtgtccagctgtgataagaacacaggagactactatgaggatagctatgaggacatcagtgcttacctgctgagcaagaataatgccattgaacccaggtcattttcccaaaatccccctgtgctgaaaaggcaccagagggagatcacgcgtaccaccctgcagagtgaccaggaggaaattgattatgatgacaccatctctgtggaaatgaaaaaggaggattttgacatctatgatgaggatgagaaccagagccctagaagcttccagaaaaagactagacactacttcattgctgcagtggagagactctgggattatggcatgagctccagcccccatgtgctgagaaatagagctcagagtggcagtgtgccacagttcaagaaggtggtgtttcaggagttcactgatggctccttcacacaaccactttacagaggagaactgaatgagcacctgggcctcctgggcccctacatcagggctgaagtggaggataacattatggtcacatttaggaatcaggcttccagaccctactccttttattcctcactcatttcctatgaggaggaccagaggcagggagctgagcccagaaaaaattttgtgaaacccaatgaaaccaagacctacttctggaaggtgcagcaccatatggcccctaccaaggatgaatttgactgcaaggcttgggcttacttttctgatgtggaccttgagaaagatgtgcattcaggcctcattgggccactgctggtgtgccacaccaatacactgaaccctgctcatgggagacaggtcacagtgcaggagtttgcactcttctttaccatctttgatgagaccaagtcctggtatttcactgagaacatggagaggaactgcagggccccttgtaacatccagatggaggatcccaccttcaaggaaaactacagattccatgccatcaatggctacatcatggacaccctgccaggcctggtgatggcccaggaccagaggatcaggtggtacctcctgtctatgggcagcaatgaaaatatccacagcattcacttctctggacatgtgtttactgtgaggaagaaggaggaatacaagatggctctgtacaacctctaccctggggtgtttgaaacagtggagatgctgccctccaaggctggcatctggagagtggaatgtctgattggggagcatctgcatgctggcatgagcacactgttcctggtgtattccaacaagtgccagaccccactgggcatggcctcaggacatatcagggacttccagatcactgctagtggacaatatggacagtgggcacccaagctggccagactgcactactcaggctccatcaatgcctggagtaccaaggagcccttcagctggatcaaggtggacctgctggcccccatgattatacatggcatcaagacccagggagctagacagaagttcagctccctgtacatctcccaattcatcatcatgtactctctggatggcaagaaatggcagacctacagaggcaatagcactggcaccctgatggtgttttttggaaatgttgactcttctggcatcaagcacaacatcttcaacccccccatcattgccagatatatcaggctccaccccacccactactccataaggagcaccctgagaatggagctgatgggctgtgacctgaattcctgctccatgcccctgggcatggaatccaaggcaatctctgatgcacagatcacagcctcctcctacttcaccaacatgtttgcaacctggagcccctccaaggccagactgcacctgcagggcaggtccaatgcttggagaccacaagtgaacaacccaaaggagtggctgcaggtggacttccagaagaccatgaaagtgactggagtgaccacccagggagtgaaatccctgctcactagcatgtatgtgaaggaattcctgatcagtagctctcaagatggccaccagtggaccctgttcttccagaatggcaaggtgaaggtgtttcagggcaaccaggattccttcacccctgtggtgaatagcctggatcccccactgctgaccagatacctgagaatccacccccagtcctgggttcaccagattgccctgagaatggaggtgctgggctgtgaggcccaggacctgtac

SEQ ID NO: 4 - DNA, 4314 bp, Artificial sequence
  codon optimised sequence of a Factor VIII deletion variant
gccaccagacgatattacctgggagctgtggaactgagctgggactacatgcagtctgacctgggagagctgcctgtggatgctagatttcctcctcgagtgcccaagagcttccccttcaacaccagtgtggtttacaagaaaaccctgtttgtggaattcacagaccacctgttcaatattgccaagcctagacctccctggatgggactgttgggacctacaattcaggctgaggtgtatgacacagtggtcatcaccctgaagaacatggccagccatcctgtgtctctgcatgctgtgggagtgtcttactggaaggcttctgagggagctgagtatgatgatcagacaagccagagagagaaagaggatgacaaggttttccctggaggcagccacacctatgtctggcaagtgctgaaagaaaatggccctatggccagtgatcctctgtgcctgacatacagctacctgagccatgtggacctggtcaaggacctgaattctggcctgattggagccctgcttgtgtgtagagaaggcagcctggccaaagagaaaacccagacactgcacaagttcatcctgctctttgctgtgtttgatgagggcaagagctggcacagtgagacaaagaacagcctgatgcaggacagggatgctgcctctgcacgagcttggcctaagatgcacacagtgaatggctatgtgaacagaagcctgcctggactgattggctgccacagaaagagtgtgtactggcatgtgattggcatgggcacaacacctgaggtgcacagcatctttctggaaggacacaccttccttgtgagaaaccatagacaggccagcctggaaatcagccctatcaccttcctgactgcacagaccctgctgatggatctgggccagtttctgcttttctgccacatcagcagccaccagcatgatggcatggaagcctatgtgaaggtggacagctgccctgaagagccccagctgagaatgaagaacaatgaggaagctgaggactatgatgatgacctgacagactctgagatggatgtggtcagatttgatgatgacaacagccccagcttcatccaaatcagaagtgtggccaagaaacaccccaagacctgggtgcactatattgctgcggaggaagaggactgggattatgctcctctggtgctggcccctgatgacagaagctacaagagccagtacctgaacaatggccctcagagaattggcagaaagtataagaaagtgagattcatggcctacacagatgagacattcaagaccagagaggccattcagcatgagagtggcattctgggccctctgctttatggagaagtgggagatacactgctgatcatattcaagaaccaggccagcagaccctacaacatctaccctcatggcatcacagatgtgagacccctgtattctagaaggctgcccaagggagtgaagcacctgaaggacttccctatcctgcctggagagatcttcaagtacaagtggacagtgacagtggaagatggccccaccaagagtgaccctagatgtctgacaagatactacagctcctttgtgaacatggaaagagacctggccagtggcctgattggacctctgctgatctgctacaaagaaagtgtggaccagagaggcaaccagatcatgagtgacaagagaaatgtgatcctgtttagtgtgtttgatgagaacagatcctggtatctgacagagaacatccagagatttctgcccaatcctgctggagtgcagctggaagatcctgagttccaggcctccaacatcatgcactccatcaatggctatgtgtttgacagcctgcagctgagtgtgtgcctgcatgaagtggcctattggtatatcctgagcattggagcccagacagacttcctgagtgtgttctttagtggctacaccttcaagcacaagatggtgtatgaggataccctgacactgttcccattctccggagagacagtgttcatgtccatggaaaaccctggcctgtggatcctgggctgtcacaacagtgacttcagaaacagaggcatgacagccctgcttaaggtgtccagctgtgacaagaacacaggagactactatgaggacagctatgaggacatcagtgcctacctgcttagcaagaacaatgccattgagcctagaagcttcagccagaatccacctgtgctgaagagacaccagagagagatcacgcgtacaaccctgcagagtgaccaagaggaaattgattatgatgacaccatcagtgtggagatgaagaaagaagattttgacatctatgatgaggatgagaatcagagccccagaagctttcagaaaaagaccagacactacttcattgctgcagtggagagactgtgggactatggcatgtctagcagccctcatgtgctgagaaatagagcccagagtggcagtgtgccccagttcaagaaagtggttttccaagagttcacagatggcagcttcacccagccactgtatagaggagagctgaatgagcatctgggcctgcttggcccttatatccgggctgaagtggaagataacatcatggtcaccttcagaaatcaggcctctagaccctacagcttctacagctccctgatcagctatgaagaggaccagagacagggagctgagcccagaaagaactttgtgaagcccaatgagactaagacctacttttggaaggtgcagcaccacatggcccctacaaaggatgagtttgactgcaaggcctgggcctactttagtgatgtggatctggaaaaggatgtgcacagtgggctcattggaccactgcttgtgtgccacaccaacacactgaaccctgctcatggcagacaagtgacagtgcaagagtttgccctgttcttcaccatctttgatgaaacaaagagctggtacttcacagagaatatggaaagaaactgcagagccccttgcaacatccagatggaagatcccaccttcaaagagaactacagattccatgccatcaatggctacatcatggacacactgcctggcctggttatggctcaggatcagagaatcagatggtatctgctgtctatgggctccaatgagaatatccacagcatccacttcagtggccatgtgttcacagtgagaaaaaaggaagagtacaaaatggccctgtacaatctgtaccctggggtgtttgaaacagtggaaatgctgccttccaaggctggcatttggagagtggaatgtctgattggagagcacctccatgctggaatgagcaccctgtttctggtgtacagcaacaagtgtcagacccctcttggcatggcctctggacacatcagagacttccagatcacagcctctggccagtatggacagtgggctcctaaactggctagactgcactacagtggcagcatcaatgcctggtccaccaaagagcccttcagctggatcaaggtggacctgcttgctcccatgatcatacatggaatcaagacccagggagccagacagaagttcagcagtctgtacatcagccagttcatcattatgtacagcctggatggcaagaaatggcagacctacagaggcaacagcacaggcacactcatggtgttctttggcaatgtggactccagtggcattaagcacaacatcttcaaccctcctatcattgccagatacatcagactgcaccccacacactacagcatcagatctaccctgagaatggaactgatgggctgtgacctgaacagctgcagcatgccccttggaatggaaagcaaggccatcagtgatgcccagatcacagccagctcctacttcaccaacatgtttgccacttggagcccctccaaggctagactgcatctgcagggcagaagcaatgcttggaggccccaagtgaacaaccccaaagagtggctgcaggtggactttcaaaagaccatgaaagtgacaggagtgaccacacagggagtcaagtctcttctgaccagcatgtatgtgaaagagttcctgatctccagtagccaggatggccatcagtggaccctgtttttccaaaatggcaaagtgaaagtgttccagggcaatcaggacagcttcacacctgtggtcaactccctggatcctcctctgcttacccggtacctgagaattcaccctcagtcttgggtgcaccagattgctctgagaatggaagtgctgggctgtgaagctcaggacctctac

SEQ ID NO: 5 - DNA, 4314 bp, Artificial sequence
  codon optimised sequence of a Factor VIII deletion variant
gctacaaggcgttactatctgggagctgtggagctgtcttgggattacatgcagtcagacctgggagagctgccagtggatgccagatttccccctcgagtgcccaagagcttcccttttaatacctctgtggtgtataagaaaaccctgtttgtggagtttaccgatcacctgttcaacattgctaagccaaggccaccctggatgggcctgctgggaccaacaatccaggctgaggtgtatgatacagtggtcatcaccctgaagaacatggcttcccaccctgtgtcactgcatgctgtgggagtgagctactggaaggccagtgagggagctgagtatgatgatcagaccagccagagagagaaggaggatgacaaggtgtttcctggaggctctcatacctatgtgtggcaggtgctgaaggagaatggcccaatggctagtgatcccctgtgcctgacctacagctatctgtctcatgtggacctggtgaaggatctgaacagtggcctgattggagccctgcttgtgtgtcgtgaaggctctctggccaaggaaaagacccagacactgcataagttcatcctgctttttgctgtgtttgatgagggcaagtcctggcacagtgagacaaagaactccctgatgcaggacagggatgctgccagtgccagggcctggcccaagatgcatacagtgaatggctatgtgaataggtccctgcctggcctgattggatgtcacagaaagagtgtgtattggcatgtgattggcatgggcaccacacctgaggttcactccatcttcctggagggccatacctttcttgtgagaaaccacaggcaggccagtctggagatcagtcctatcaccttcctgacagcccagaccctgcttatggatctgggccagttcctgcttttttgccacatctccagtcaccagcatgatggcatggaggcttatgtgaaggtggactcctgtcctgaggaacctcagctgagaatgaagaacaatgaggaagctgaggactatgatgatgacctgacagactctgagatggatgtggttagatttgatgatgacaactctccttcctttattcaaatccgatcagtggccaagaaacacccaaagacatgggtgcattacattgctgcagaggaggaggactgggattatgctcctctggtgctggcccctgatgacaggtcctacaagtcccagtatctgaacaatggccctcagaggattggcagaaagtacaagaaagtgaggttcatggcttatacagatgagacattcaagacaagggaggccatccagcatgagagtggcatcctgggaccactgctttatggagaagtgggagacaccctgcttatcatttttaaaaaccaggcttccaggccctacaatatctatcctcatggcatcacggatgtgagacccctgtacagtaggagactgcctaagggagtgaagcacctgaaggacttcccaatcctgcctggagagattttcaagtataagtggacagtgacagtggaggatggcccaaccaagagtgaccccaggtgcctgacaagatactattcttcctttgtgaatatggagagggacctggcctctggcctgattggacctctgcttatctgttacaaggagtctgtggatcagagaggcaaccagatcatgagtgacaagaggaatgtgatcctgttcagtgtgtttgatgagaacaggtcttggtatctgacagagaacatccagagattcctgcccaatcctgctggagtgcaactggaggaccctgagtttcaggcctccaacatcatgcatagcatcaatggctatgtgtttgactccctccaactgagtgtgtgcctgcatgaggtggcttattggtacattctgagcattggagcccagacagatttcctgagtgtgttctttagtggctacaccttcaagcataagatggtgtatgaggacaccctgacactgttccccttttctggagagacagtgttcatgtccatggagaatcctggcctgtggattctgggctgccacaactctgatttccgtaatcgtggcatgacagcccttctgaaggtgtcttcctgtgacaagaacacaggagactactatgaggattcttatgaggacatcagtgcttatctgcttagcaagaacaatgccattgagccaaggagcttttctcagaatcctccagtgctgaagagacaccagagagagatcacgcgtaccacactccagagtgatcaggaggaaattgactatgatgacacaatcagtgtggagatgaaaaaggaggactttgacatctatgatgaggatgagaaccagagccccaggtctttccagaagaaaaccagacattactttattgctgcagtggagagactgtgggattatggcatgtccagctctccacatgtgctgagaaatagagcccagagtggcagtgtgccccagttcaagaaagtggttttccaggagtttacagatggatcatttacacagcctctgtacagaggagagctgaatgagcatctgggcctgcttggcccatatatcagagctgaggtggaggataacatcatggtgaccttccgtaatcaggccagcaggccctactccttttattcatccctgatctcctatgaggaagaccagagacagggagctgagccaagaaagaactttgtgaagcccaatgagacaaagacctacttttggaaggtgcagcaccatatggcccctaccaaggatgagtttgattgcaaggcttgggcttacttcagtgatgtggatctggagaaggatgtgcattctggcctgattggaccactgcttgtgtgccataccaacacactgaatcctgctcatggcagacaagtgacagtgcaggagtttgccctgttctttaccatctttgatgagacaaagagctggtacttcacagagaacatggagaggaattgcagggctccttgtaacatccagatggaggacccaaccttcaaggagaactacagatttcatgctatcaatggctatatcatggatacactgcctggcctggtcatggctcaggaccagaggatcaggtggtatctgcttagcatgggctccaatgagaatatccacagcatccatttctctggccatgtgtttaccgtgagaaaaaaggaggaatataagatggccctgtacaacctgtatcctggagtgtttgagacagtggagatgctgccatctaaggctggcatctggagggtggagtgcctgattggagagcacctgcatgctggcatgtctaccctgtttctggtgtactccaataagtgtcagacaccactgggcatggccagtggccatatcagagatttccagatcacagcctctggacagtatggacagtgggctccaaagctggctagactgcactattctggctccatcaatgcctggtccaccaaggagcccttctcctggatcaaggtggacctgcttgctcccatgatcattcatggcatcaagacacagggagccaggcagaagttctcttccctgtacatcagccagtttatcatcatgtattctctggatggcaagaaatggcagacctacagaggcaattctacaggcacactgatggtgttctttggcaatgtggacagctctggcatcaagcacaacatcttcaatccccctatcattgctagatacatcagactgcaccctacccattattctatccgatccacactgagaatggagctgatgggctgtgatctgaacagctgttctatgccactgggcatggagtccaaggccatcagtgatgctcagatcacagcctccagctacttcaccaatatgtttgctacatggtcccctagcaaggccaggctgcacctccagggcagatccaatgcttggagacctcaagttaacaatccaaaggagtggctccaggtggattttcagaaaaccatgaaggtgacaggagtgaccacccagggagtgaagtctctgcttaccagcatgtatgtgaaggagttcctgatctcttcgagtcaagatggacaccagtggacactgttctttcagaatggcaaggtgaaggtgttccagggcaatcaggattcctttaccccagtggtgaacagcctggacccaccactgcttacaagatacctgagaatccaccctcagtcctgggtgcatcagattgctctgaggatggaggtgctgggatgtgaggctcaggacctgtat

SEQ ID NO: 6 - DNA, 4314 bp, Artificial sequence
  codon optimised sequence of a Factor VIII deletion variant
gccaccagacgttactacctgggagctgtggagctgagctgggactacatgcagagtgacctgggagagctgcctgtggatgccagattcccccctcgagtgcccaagagcttccccttcaacaccagtgtggtgtacaaaaagaccctgtttgtggagttcacagaccacctgttcaacattgccaagcccagacccccttggatgggcctgcttggccccaccatccaagctgaggtgtatgacacagtggttatcaccctgaagaacatggccagccaccctgttagtctgcatgctgtgggagtgagctactggaaggccagtgaaggagctgagtatgatgaccagaccagccagagagagaaggaggatgacaaggtgttccctggaggcagccacacctatgtgtggcaggtgctgaaggagaatggccctatggccagtgaccccctgtgcctgacctacagctacctgagccatgtggacctggtgaaggacctgaacagtggcctgattggagccctgcttgtgtgcagagagggcagcctggccaaggagaagacccagaccctgcacaagttcatcctgttgtttgctgtgtttgatgagggcaagagctggcacagtgagaccaagaacagcctgatgcaggacagagatgctgccagtgccagagcctggcccaagatgcacacagtgaatggctatgtgaacagaagcctgcctggcctgattggctgccacagaaagagtgtgtactggcatgtgattggcatgggcaccacacctgaggtgcacagcatcttcctggagggccacaccttccttgttcgtaaccacagacaggccagcctggagatcagccccatcaccttcctgacagcccagaccctgcttatggacctgggccagttcctgcttttctgccacatcagcagtcaccagcatgatggcatggaggcctatgtgaaggtggacagctgccctgaggaaccccagctgagaatgaagaacaatgaggaagctgaggactatgacgatgacctgacagacagtgagatggatgtggttagatttgacgatgacaacagccccagcttcatccaaatcagaagtgtggccaagaagcaccccaagacctgggtgcactacattgcagctgaggaggaagactgggactatgcccccctggtgctggcccctgatgacagaagctacaagagccagtacctgaacaatggcccccagagaattggcagaaagtacaagaaagtgagattcatggcctacacagatgagaccttcaagaccagagaggccatccagcatgagagtggcatcctgggcccccttctgtatggagaggtgggagacacccttctgataatcttcaagaaccaggccagcagaccctacaacatctaccctcatggcatcacagatgtgagacccctgtacagcagaaggctgcccaagggagtgaagcacctgaaggacttccccatcctgcctggagagatcttcaagtacaagtggacagtgacagtggaggatggccccaccaagagtgaccccagatgcctgaccagatactatagtagctttgtgaacatggagagagacctggccagtggcctgattggcccccttctgatctgctacaaggagagtgtggaccagagaggcaaccagatcatgagtgacaagagaaatgtgatcctgttcagtgtgtttgatgagaacagaagttggtacctgacagagaacatccagagattcctgcccaaccctgctggagtgcagctggaggaccctgagttccaggccagcaacatcatgcacagcatcaatggctatgtgtttgacagcctgcagctgagtgtgtgcctgcatgaggtggcctattggtatatcctgagcattggagcccagacagacttcctgagtgtgttcttcagtggctacaccttcaagcacaagatggtgtatgaggacaccctgaccctgttccccttctctggagagacagtgttcatgtccatggagaaccctggcctgtggatcctgggctgccacaacagtgacttcagaaacagaggcatgacagcccttctgaaagttagcagttgtgacaagaacacaggagactactatgaggacagctatgaggacatcagtgcctacctgcttagcaagaataatgccattgagcctagaagcttcagccagaacccacctgtgctgaagagacaccagagagagatcacgcgtacaaccctgcagagtgaccaggaggaaattgactatgatgacaccatcagtgtggagatgaaaaaggaggactttgacatctatgatgaggatgagaaccagagccccagaagcttccagaagaaaaccagacactacttcattgcggctgtggagagactgtgggactatggcatgagtagcagtccccatgtgctgagaaacagggcccagagtggcagtgtgccccagttcaaaaaggtggttttccaggagttcacagatggcagcttcacccagcccctgtaccgtggagagctgaatgagcacctgggccttctgggcccctacatcagagctgaggtggaggacaacatcatggtgaccttcagaaaccaggccagcagaccctacagcttctactcatccctgatctcttatgaagaggaccagagacagggagctgagcccagaaagaactttgtgaagcccaatgagaccaagacctacttctggaaggtgcagcaccacatggcccccaccaaggatgagtttgactgcaaggcctgggcctacttcagtgatgtggacctggagaaggatgtgcacagtggcctgattggccccctgcttgtgtgccacaccaacaccctgaaccctgctcatggcagacaagttactgtgcaggagtttgccctgttctttaccatctttgatgagaccaagagctggtacttcacagagaacatggagagaaactgcagagccccctgcaacatccagatggaggaccccaccttcaaggagaactacagattccatgccatcaatggctacatcatggacaccctgcctggcctggtgatggcccaggaccagagaatcaggtggtacctgcttagcatgggcagcaatgagaacatccacagcatccacttcagtggccatgtgttcacagtgagaaagaaagaggaatacaagatggccctgtacaacctgtaccctggagtgtttgagacagtggagatgctgcccagcaaggctggcatctggagagtggagtgcctgattggagagcacctgcatgctggcatgagcaccctgttcctggtgtacagcaacaagtgccagacccccctgggcatggccagtggccacatcagagacttccagatcacagccagtggccagtatggccagtgggcccccaagctggccagactgcactacagtggcagcatcaatgcctggagcaccaaggagcccttcagctggatcaaggtggacctgcttgcccccatgatcattcatggcatcaagacccagggagccagacagaagttcagcagtctgtacatcagccagttcatcattatgtacagcctggatggcaagaaatggcagacctacagaggcaacagcacaggcaccctgatggtgttctttggcaatgtggacagttctggcatcaagcacaacatcttcaacccccccatcattgccagatacatcagactgcaccccacccactacagcatcagaagcaccctgaggatggagctgatgggctgtgacctgaacagctgcagcatgcccctgggcatggagagcaaggccatcagtgatgctcagatcacagcctccagctacttcaccaacatgtttgccacctggagccccagcaaggccagactgcacctgcagggcagaagcaatgcctggagaccccaagttaataatcccaaggagtggctgcaggtggacttccagaagaccatgaaggtgacaggagtgacaacccagggagtgaagagcctgctgaccagcatgtatgtgaaggagttcctgatctccagtagccaggatggccaccagtggaccctgttctttcaaaatggcaaggtgaaggtgttccagggcaaccaggacagcttcacccctgtggtgaacagcctggacccccctctgcttacccgatacctgagaatccacccccagagctgggtgcaccagattgccctgagaatggaggtgctgggctgtgaggcccaggacctgtac

SEQ ID NO: 7 - protein, 1438 aa, Artificial sequence
  amino acid sequence of a Factor VIII deletion variant
ATRRYYLGAVELSWDYMQSDLGELPVDARFPPRVPKSFPFNTSVVYKKTLFVEFTDHLFNIAKPRPPWMGLLGPTIQAEVYDTVVITLKNMASHPVSLHAVGVSYWKASEGAEYDDQTSQREKEDDKVFPGGSHTYVWQVLKENGPMASDPLCLTYSYLSHVDLVKDLNSGLIGALLVCREGSLAKEKTQTLHKFILLFAVFDEGKSWHSETKNSLMQDRDAASARAWPKMHTVNGYVNRSLPGLIGCHRKSVYWHVIGMGTTPEVHSIFLEGHTFLVRNHRQASLEISPITFLTAQTLLMDLGQFLLFCHISSHQHDGMEAYVKVDSCPEEPQLRMKNNEEAEDYDDDLTDSEMDVVRFDDDNSPSFIQIRSVAKKHPKTWVHYIAAEEEDWDYAPLVLAPDDRSYKSQYLNNGPQRIGRKYKKVRFMAYTDETFKTREAIQHESGILGPLLYGEVGDTLLIIFKNQASRPYNIYPHGITDVRPLYSRRLPKGVKHLKDFPILPGEIFKYKWTVTVEDGPTKSDPRCLTRYYSSFVNMERDLASGLIGPLLICYKESVDQRGNQIMSDKRNVILFSVFDENRSWYLTENIQRFLPNPAGVQLEDPEFQASNIMHSINGYVFDSLQLSVCLHEVAYWYILSIGAQTDFLSVFFSGYTFKHKMVYEDTLTLFPFSGETVFMSMENPGLWILGCHNSDFRNRGMTALLKVSSCDKNTGDYYEDSYEDISAYLLSKNNAIEPRSFSQNPPVLKRHQREITRTTLQSDQEEIDYDDTISVEMKKEDFDIYDEDENQSPRSFQKKTRHYFIAAVERLWDYGMSSSPHVLRNRAQSGSVPQFKKVVFQEFTDGSFTQPLYRGELNEHLGLLGPYIRAEVEDNIMVTFRNQASRPYSFYSSLISYEEDQRQGAEPRKNFVKPNETKTYFWKVQHHMAPTKDEFDCKAWAYFSDVDLEKDVHSGLIGPLLVCHTNTLNPAHGRQVTVQEFALFFTIFDETKSWYFTENMERNCRAPCNIQMEDPTFKENYRFHAINGYIMDTLPGLVMAQDQRIRWYLLSMGSNENIHSIHFSGHVFTVRKKEEYKMALYNLYPGVFETVEMLPSKAGIWRVECLIGEHLHAGMSTLFLVYSNKCQTPLGMASGHIRDFQITASGQYGQWAPKLARLHYSGSINAWSTKEPFSWIKVDLLAPMIIHGIKTQGARQKFSSLYISQFIIMYSLDGKKWQTYRGNSTGTLMVFFGNVDSSGIKHNIFNPPIIARYIRLHPTHYSIRSTLRMELMGCDLNSCSMPLGMESKAISDAQITASSYFTNMFATWSPSKARLHLQGRSNAWRPQVNNPKEWLQVDFQKTMKVTGVTTQGVKSLLTSMYVKEFLISSSQDGHQWTLFFQNGKVKVFQGNQDSFTPVVNSLDPPLLTRYLRIHPQSWVHQIALRMEVLGCEAQDLY

SEQ ID NO: 8 - protein, 1424 aa, Artificial sequence
  amino acid sequence of a Factor VIII deletion variant
ATRRYYLGAVELSWDYMQSDLGELPVDARFPPRVPKSFPFNTSVVYKKTLFVEFTDHLFNIAKPRPPWMGLLGPTIQAEVYDTVVITLKNMASHPVSLHAVGVSYWKASEGAEYDDQTSQREKEDDKVFPGGSHTYVWQVLKENGPMASDPLCLTYSYLSHVDLVKDLNSGLIGALLVCREGSLAKEKTQTLHKFILLFAVFDEGKSWHSETKNSLMQDRDAASARAWPKMHTVNGYVNRSLPGLIGCHRKSVYWHVIGMGTTPEVHSIFLEGHTFLVRNHRQASLEISPITFLTAQTLLMDLGQFLLFCHISSHQHDGMEAYVKVDSCPEEPQLRMKNNEEAEDYDDDLTDSEMDVVRFDDDNSPSFIQIRSVAKKHPKTWVHYIAAEEEDWDYAPLVLAPDDRSYKSQYLNNGPQRIGRKYKKVRFMAYTDETFKTREAIQHESGILGPLLYGEVGDTLLIIFKNQASRPYNIYPHGITDVRPLYSRRLPKGVKHLKDFPILPGEIFKYKWTVTVEDGPTKSDPRCLTRYYSSFVNMERDLASGLIGPLLICYKESVDQRGNQIMSDKRNVILFSVFDENRSWYLTENIQRFLPNPAGVQLEDPEFQASNIMHSINGYVFDSLQLSVCLHEVAYWYILSIGAQTDFLSVFFSGYTFKHKMVYEDTLTLFPFSGETVFMSMENPGLWILGCHNSDFRNRGMTALLKVSSCDKNTGDYYEDSYEDISAYLLSKNNAIEPREITRTTLQSDQEEIDYDDTISVEMKKEDFDIYDEDENQSPRSFQKKTRHYFIAAVERLWDYGMSSSPHVLRNRAQSGSVPQFKKVVFQEFTDGSFTQPLYRGELNEHLGLLGPYIRAEVEDNIMVTFRNQASRPYSFYSSLISYEEDQRQGAEPRKNFVKPNETKTYFWKVQHHMAPTKDEFDCKAWAYFSDVDLEKDVHSGLIGPLLVCHTNTLNPAHGRQVTVQEFALFFTIFDETKSWYFTENMERNCRAPCNIQMEDPTFKENYRFHAINGYIMDTLPGLVMAQDQRIRWYLLSMGSNENIHSIHFSGHVFTVRKKEEYKMALYNLYPGVFETVEMLPSKAGIWRVECLIGEHLHAGMSTLFLVYSNKCQTPLGMASGHIRDFQITASGQYGQWAPKLARLHYSGSINAWSTKEPFSWIKVDLLAPMIIHGIKTQGARQKFSSLYISQFIIMYSLDGKKWQTYRGNSTGTLMVFFGNVDSSGIKHNIFNPPIIARYIRLHPTHYSIRSTLRMELMGCDLNSCSMPLGMESKAISDAQITASSYFTNMFATWSPSKARLHLQGRSNAWRPQVNNPKEWLQVDFQKTMKVTGVTTQGVKSLLTSMYVKEFLISSSQDGHQWTLFFQNGKVKVFQGNQDSFTPVVNSLDPPLLTRYLRIHPQSWVHQIALRMEVLGCEAQDLY

SEQ ID NO: 9 - protein, 1403 aa, Artificial sequence
  amino acid sequence of a Factor VIII deletion variant
ATRRYYLGAVELSWDYMQSDLGELPVDARFPPRVPKSFPFNTSVVYKKTLFVEFTDHLFNIAKPRPPWMGLLGPTIQAEVYDTVVITLKNMASHPVSLHAVGVSYWKASEGAEYDDQTSQREKEDDKVFPGGSHTYVWQVLKENGPMASDPLCLTYSYLSHVDLVKDLNSGLIGALLVCREGSLAKEKTQTLHKFILLFAVFDEGKSWHSETKNSLMQDRDAASARAWPKMHTVNGYVNRSLPGLIGCHRKSVYWHVIGMGTTPEVHSIFLEGHTFLVRNHRQASLEISPITFLTAQTLLMDLGQFLLFCHISSHQHDGMEAYVKVDSCPEEPQLRMKNNEEAEDYDDDLTDSEMDVVRFDDDNSPSFIQIRSVAKKHPKTWVHYIAAEEEDWDYAPLVLAPDDRSYKSQYLNNGPQRIGRKYKKVRFMAYTDETFKTREAIQHESGILGPLLYGEVGDTLLIIFKNQASRPYNIYPHGITDVRPLYSRRLPKGVKHLKDFPILPGEIFKYKWTVTVEDGPTKSDPRCLTRYYSSFVNMERDLASGLIGPLLICYKESVDQRGNQIMSDKRNVILFSVFDENRSWYLTENIQRFLPNPAGVQLEDPEFQASNIMHSINGYVFDSLQLSVCLHEVAYWYILSIGAQTDFLSVFFSGYTFKHKMVYEDTLTLFPFSGETVFMSMENPGLWILGCHNSDFRNRGMTALLKVSSCDKNTGDYYEDSYEDISAYLLSKNNAIEPRVEMKKEDFDIYDEDENQSPRSFQKKTRHYFIAAVERLWDYGMSSSPHVLRNRAQSGSVPQFKKVVFQEFTDGSFTQPLYRGELNEHLGLLGPYIRAEVEDNIMVTFRNQASRPYSFYSSLISYEEDQRQGAEPRKNFVKPNETKTYFWKVQHHMAPTKDEFDCKAWAYFSDVDLEKDVHSGLIGPLLVCHTNTLNPAHGRQVTVQEFALFFTIFDETKSWYFTENMERNCRAPCNIQMEDPTFKENYRFHAINGYIMDTLPGLVMAQDQRIRWYLLSMGSNENIHSIHFSGHVFTVRKKEEYKMALYNLYPGVFETVEMLPSKAGIWRVECLIGEHLHAGMSTLFLVYSNKCQTPLGMASGHIRDFQITASGQYGQWAPKLARLHYSGSINAWSTKEPFSWIKVDLLAPMIIHGIKTQGARQKFSSLYISQFIIMYSLDGKKWQTYRGNSTGTLMVFFGNVDSSGIKHNIFNPPIIARYIRLHPTHYSIRSTLRMELMGCDLNSCSMPLGMESKAISDAQITASSYFTNMFATWSPSKARLHLQGRSNAWRPQVNNPKEWLQVDFQKTMKVTGVTTQGVKSLLTSMYVKEFLISSSQDGHQWTLFFQNGKVKVFQGNQDSFTPVVNSLDPPLLTRYLRIHPQSWVHQIALRMEVLGCEAQDLY

SEQ ID NO: 10 - protein, 1383 aa, Artificial sequence
  amino acid sequence of a Factor VIII deletion variant
ATRRYYLGAVELSWDYMQSDLGELPVDARFPPRVPKSFPFNTSVVYKKTLFVEFTDHLFNIAKPRPPWMGLLGPTIQAEVYDTVVITLKNMASHPVSLHAVGVSYWKASEGAEYDDQTSQREKEDDKVFPGGSHTYVWQVLKENGPMASDPLCLTYSYLSHVDLVKDLNSGLIGALLVCREGSLAKEKTQTLHKFILLFAVFDEGKSWHSETKNSLMQDRDAASARAWPKMHTVNGYVNRSLPGLIGCHRKSVYWHVIGMGTTPEVHSIFLEGHTFLVRNHRQASLEISPITFLTAQTLLMDLGQFLLFCHISSHQHDGMEAYVKVDSCPEEPQLRMKNNEEAEDYDDDLTDSEMDVVRFDDDNSPSFIQIRSVAKKHPKTWVHYIAAEEEDWDYAPLVLAPDDRSYKSQYLNNGPQRIGRKYKKVRFMAYTDETFKTREAIQHESGILGPLLYGEVGDTLLIIFKNQASRPYNIYPHGITDVRPLYSRRLPKGVKHLKDFPILPGEIFKYKWTVTVEDGPTKSDPRCLTRYYSSFVNMERDLASGLIGPLLICYKESVDQRGNQIMSDKRNVILFSVFDENRSWYLTENIQRFLPNPAGVQLEDPEFQASNIMHSINGYVFDSLQLSVCLHEVAYWYILSIGAQTDFLSVFFSGYTFKHKMVYEDTLTLFPFSGETVFMSMENPGLWILGCHNSDFRNRGMTALLKVSSCDKNTGDYYEDSYEDISAYLLSKNNAIEPRSFQKKTRHYFIAAVERLWDYGMSSSPHVLRNRAQSGSVPQFKKVVFQEFTDGSFTQPLYRGELNEHLGLLGPYIRAEVEDNIMVTFRNQASRPYSFYSSLISYEEDQRQGAEPRKNFVKPNETKTYFWKVQHHMAPTKDEFDCKAWAYFSDVDLEKDVHSGLIGPLLVCHTNTLNPAHGRQVTVQEFALFFTIFDETKSWYFTENMERNCRAPCNIQMEDPTFKENYRFHAINGYIMDTLPGLVMAQDQRIRWYLLSMGSNENIHSIHFSGHVFTVRKKEEYKMALYNLYPGVFETVEMLPSKAGIWRVECLIGEHLHAGMSTLFLVYSNKCQTPLGMASGHIRDFQITASGQYGQWAPKLARLHYSGSINAWSTKEPFSWIKVDLLAPMIIHGIKTQGARQKFSSLYISQFIIMYSLDGKKWQTYRGNSTGTLMVFFGNVDSSGIKHNIFNPPIIARYIRLHPTHYSIRSTLRMELMGCDLNSCSMPLGMESKAISDAQITASSYFTNMFATWSPSKARLHLQGRSNAWRPQVNNPKEWLQVDFQKTMKVTGVTTQGVKSLLTSMYVKEFLISSSQDGHQWTLFFQNGKVKVFQGNQDSFTPVVNSLDPPLLTRYLRIHPQSWVHQIALRMEVLGCEAQDLY

SEQ ID NO: 11 - protein, 1384 aa, Artificial sequence
  amino acid sequence of a Factor VIII deletion variant
ATRRYYLGAVELSWDYMQSDLGELPVDARFPPRVPKSFPFNTSVVYKKTLFVEFTDHLFNIAKPRPPWMGLLGPTIQAEVYDTVVITLKNMASHPVSLHAVGVSYWKASEGAEYDDQTSQREKEDDKVFPGGSHTYVWQVLKENGPMASDPLCLTYSYLSHVDLVKDLNSGLIGALLVCREGSLAKEKTQTLHKFILLFAVFDEGKSWHSETKNSLMQDRDAASARAWPKMHTVNGYVNRSLPGLIGCHRKSVYWHVIGMGTTPEVHSIFLEGHTFLVRNHRQASLEISPITFLTAQTLLMDLGQFLLFCHISSHQHDGMEAYVKVDSCPEEPQLRMKNNEEAEDYDDDLTDSEMDVVRFDDDNSPSFIQIRSVAKKHPKTWVHYIAAEEEDWDYAPLVLAPDDRSYKSQYLNNGPQRIGRKYKKVRFMAYTDETFKTREAIQHESGILGPLLYGEVGDTLLIIFKNQASRPYNIYPHGITDVRPLYSRRLPKGVKHLKDFPILPGEIFKYKWTVTVEDGPTKSDPRCLTRYYSSFVNMERDLASGLIGPLLICYKESVDQRGNQIMSDKRNVILFSVFDENRSWYLTENIQRFLPNPAGVQLEDPEFQASNIMHSINGYVFDSLQLSVCLHEVAYWYILSIGAQTDFLSVFFSGYTFKHKMVYEDTLTLFPFSGETVFMSMENPGLWILGCHNSDFRNRGMTALLKVSSCDKNTGDYYEDSYEDISAYLLSKNNAIEPRRSFQKKTRHYFIAAVERLWDYGMSSSPHVLRNRAQSGSVPQFKKVVFQEFTDGSFTQPLYRGELNEHLGLLGPYIRAEVEDNIMVTFRNQASRPYSFYSSLISYEEDQRQGAEPRKNFVKPNETKTYFWKVQHHMAPTKDEFDCKAWAYFSDVDLEKDVHSGLIGPLLVCHTNTLNPAHGRQVTVQEFALFFTIFDETKSWYFTENMERNCRAPCNIQMEDPTFKENYRFHAINGYIMDTLPGLVMAQDQRIRWYLLSMGSNENIHSIHFSGHVFTVRKKEEYKMALYNLYPGVFETVEMLPSKAGIWRVECLIGEHLHAGMSTLFLVYSNKCQTPLGMASGHIRDFQITASGQYGQWAPKLARLHYSGSINAWSTKEPFSWIKVDLLAPMIIHGIKTQGARQKFSSLYISQFIIMYSLDGKKWQTYRGNSTGTLMVFFGNVDSSGIKHNIFNPPIIARYIRLHPTHYSIRSTLRMELMGCDLNSCSMPLGMESKAISDAQITASSYFTNMFATWSPSKARLHLQGRSNAWRPQVNNPKEWLQVDFQKTMKVTGVTTQGVKSLLTSMYVKEFLISSSQDGHQWTLFFQNGKVKVFQGNQDSFTPVVNSLDPPLLTRYLRIHPQSWVHQIALRMEVLGCEAQDLY

SEQ ID NO: 12 - protein, 1395 aa, Artificial sequence
  amino acid sequence of a Factor VIII deletion variant
ATRRYYLGAVELSWDYMQSDLGELPVDARFPPRVPKSFPFNTSVVYKKTLFVEFTDHLFNIAKPRPPWMGLLGPTIQAEVYDTVVITLKNMASHPVSLHAVGVSYWKASEGAEYDDQTSQREKEDDKVFPGGSHTYVWQVLKENGPMASDPLCLTYSYLSHVDLVKDLNSGLIGALLVCREGSLAKEKTQTLHKFILLFAVFDEGKSWHSETKNSLMQDRDAASARAWPKMHTVNGYVNRSLPGLIGCHRKSVYWHVIGMGTTPEVHSIFLEGHTFLVRNHRQASLEISPITFLTAQTLLMDLGQFLLFCHISSHQHDGMEAYVKVDSCPEEPQLRMKNNEEAEDYDDDLTDSEMDVVRFDDDNSPSFIQIRSVAKKHPKTWVHYIAAEEEDWDYAPLVLAPDDRSYKSQYLNNGPQRIGRKYKKVRFMAYTDETFKTREAIQHESGILGPLLYGEVGDTLLIIFKNQASRPYNIYPHGITDVRPLYSRRLPKGVKHLKDFPILPGEIFKYKWTVTVEDGPTKSDPRCLTRYYSSFVNMERDLASGLIGPLLICYKESVDQRGNQIMSDKRNVILFSVFDENRSWYLTENIQRFLPNPAGVQLEDPEFQASNIMHSINGYVFDSLQLSVCLHEVAYWYILSIGAQTDFLSVFFSGYTFKHKMVYEDTLTLFPFSGETVFMSMENPGLWILGCHNSDFRNRGMTALLKVSSCDKNTGDYYEDSYEDISAYLLSKNNAIEPRVEMKKEDFDIYRSFQKKTRHYFIAAVERLWDYGMSSSPHVLRNRAQSGSVPQFKKVVFQEFTDGSFTQPLYRGELNEHLGLLGPYIRAEVEDNIMVTFRNQASRPYSFYSSLISYEEDQRQGAEPRKNFVKPNETKTYFWKVQHHMAPTKDEFDCKAWAYFSDVDLEKDVHSGLIGPLLVCHTNTLNPAHGRQVTVQEFALFFTIFDETKSWYFTENMERNCRAPCNIQMEDPTFKENYRFHAINGYIMDTLPGLVMAQDQRIRWYLLSMGSNENIHSIHFSGHVFTVRKKEEYKMALYNLYPGVFETVEMLPSKAGIWRVECLIGEHLHAGMSTLFLVYSNKCQTPLGMASGHIRDFQITASGQYGQWAPKLARLHYSGSINAWSTKEPFSWIKVDLLAPMIIHGIKTQGARQKFSSLYISQFIIMYSLDGKKWQTYRGNSTGTLMVFFGNVDSSGIKHNIFNPPIIARYIRLHPTHYSIRSTLRMELMGCDLNSCSMPLGMESKAISDAQITASSYFTNMFATWSPSKARLHLQGRSNAWRPQVNNPKEWLQVDFQKTMKVTGVTTQGVKSLLTSMYVKEFLISSSQDGHQWTLFFQNGKVKVFQGNQDSFTPVVNSLDPPLLTRYLRIHPQSWVHQIALRMEVLGCEAQDLY

SEQ ID NO: 13 - protein, 1376 aa, Artificial sequence
  amino acid sequence of a Factor VIII deletion variant
ATRRYYLGAVELSWDYMQSDLGELPVDARFPPRVPKSFPFNTSVVYKKTLFVEFTDHLFNIAKPRPPWMGLLGPTIQAEVYDTVVITLKNMASHPVSLHAVGVSYWKASEGAEYDDQTSQREKEDDKVFPGGSHTYVWQVLKENGPMASDPLCLTYSYLSHVDLVKDLNSGLIGALLVCREGSLAKEKTQTLHKFILLFAVFDEGKSWHSETKNSLMQDRDAASARAWPKMHTVNGYVNRSLPGLIGCHRKSVYWHVIGMGTTPEVHSIFLEGHTFLVRNHRQASLEISPITFLTAQTLLMDLGQFLLFCHISSHQHDGMEAYVKVDSCPEEPQLRMKNNEEAEDYDDDLTDSEMDVVRFDDDNSPSFIQIRSVAKKHPKTWVHYIAAEEEDWDYAPLVLAPDDRSYKSQYLNNGPQRIGRKYKKVRFMAYTDETFKTREAIQHESGILGPLLYGEVGDTLLIIFKNQASRPYNIYPHGITDVRPLYSRRLPKGVKHLKDFPILPGEIFKYKWTVTVEDGPTKSDPRCLTRYYSSFVNMERDLASGLIGPLLICYKESVDQRGNQIMSDKRNVILFSVFDENRSWYLTENIQRFLPNPAGVQLEDPEFQASNIMHSINGYVFDSLQLSVCLHEVAYWYILSIGAQTDFLSVFFSGYTFKHKMVYEDTLTLFPFSGETVFMSMENPGLWILGCHNSDFRNRGMTALLKVSSCDKVEMKKEDFDIYDEDENQSPRSFQKKTRHYFIAAVERLWDYGMSSSPHVLRNRAQSGSVPQFKKVVFQEFTDGSFTQPLYRGELNEHLGLLGPYIRAEVEDNIMVTFRNQASRPYSFYSSLISYEEDQRQGAEPRKNFVKPNETKTYFWKVQHHMAPTKDEFDCKAWAYFSDVDLEKDVHSGLIGPLLVCHTNTLNPAHGRQVTVQEFALFFTIFDETKSWYFTENMERNCRAPCNIQMEDPTFKENYRFHAINGYIMDTLPGLVMAQDQRIRWYLLSMGSNENIHSIHFSGHVFTVRKKEEYKMALYNLYPGVFETVEMLPSKAGIWRVECLIGEHLHAGMSTLFLVYSNKCQTPLGMASGHIRDFQITASGQYGQWAPKLARLHYSGSINAWSTKEPFSWIKVDLLAPMIIHGIKTQGARQKFSSLYISQFIIMYSLDGKKWQTYRGNSTGTLMVFFGNVDSSGIKHNIFNPPIIARYIRLHPTHYSIRSTLRMELMGCDLNSCSMPLGMESKAISDAQITASSYFTNMFATWSPSKARLHLQGRSNAWRPQVNNPKEWLQVDFQKTMKVTGVTTQGVKSLLTSMYVKEFLISSSQDGHQWTLFFQNGKVKVFQGNQDSFTPVVNSLDPPLLTRYLRIHPQSWVHQIALRMEVLGCEAQDLY

SEQ ID NO: 14 - protein, 1368 aa, Artificial sequence
  amino acid sequence of a Factor VIII deletion variant
ATRRYYLGAVELSWDYMQSDLGELPVDARFPPRVPKSFPFNTSVVYKKTLFVEFTDHLFNIAKPRPPWMGLLGPTIQAEVYDTVVITLKNMASHPVSLHAVGVSYWKASEGAEYDDQTSQREKEDDKVFPGGSHTYVWQVLKENGPMASDPLCLTYSYLSHVDLVKDLNSGLIGALLVCREGSLAKEKTQTLHKFILLFAVFDEGKSWHSETKNSLMQDRDAASARAWPKMHTVNGYVNRSLPGLIGCHRKSVYWHVIGMGTTPEVHSIFLEGHTFLVRNHRQASLEISPITFLTAQTLLMDLGQFLLFCHISSHQHDGMEAYVKVDSCPEEPQLRMKNNEEAEDYDDDLTDSEMDVVRFDDDNSPSFIQIRSVAKKHPKTWVHYIAAEEEDWDYAPLVLAPDDRSYKSQYLNNGPQRIGRKYKKVRFMAYTDETFKTREAIQHESGILGPLLYGEVGDTLLIIFKNQASRPYNIYPHGITDVRPLYSRRLPKGVKHLKDFPILPGEIFKYKWTVTVEDGPTKSDPRCLTRYYSSFVNMERDLASGLIGPLLICYKESVDQRGNQIMSDKRNVILFSVFDENRSWYLTENIQRFLPNPAGVQLEDPEFQASNIMHSINGYVFDSLQLSVCLHEVAYWYILSIGAQTDFLSVFFSGYTFKHKMVYEDTLTLFPFSGETVFMSMENPGLWILGCHNSDFRNRGMTALLKVSSCDKVEMKKEDFDIYRSFQKKTRHYFIAAVERLWDYGMSSSPHVLRNRAQSGSVPQFKKVVFQEFTDGSFTQPLYRGELNEHLGLLGPYIRAEVEDNIMVTFRNQASRPYSFYSSLISYEEDQRQGAEPRKNFVKPNETKTYFWKVQHHMAPTKDEFDCKAWAYFSDVDLEKDVHSGLIGPLLVCHTNTLNPAHGRQVTVQEFALFFTIFDETKSWYFTENMERNCRAPCNIQMEDPTFKENYRFHAINGYIMDTLPGLVMAQDQRIRWYLLSMGSNENIHSIHFSGHVFTVRKKEEYKMALYNLYPGVFETVEMLPSKAGIWRVECLIGEHLHAGMSTLFLVYSNKCQTPLGMASGHIRDFQITASGQYGQWAPKLARLHYSGSINAWSTKEPFSWIKVDLLAPMIIHGIKTQGARQKFSSLYISQFIIMYSLDGKKWQTYRGNSTGTLMVFFGNVDSSGIKHNIFNPPIIARYIRLHPTHYSIRSTLRMELMGCDLNSCSMPLGMESKAISDAQITASSYFTNMFATWSPSKARLHLQGRSNAWRPQVNNPKEWLQVDFQKTMKVTGVTTQGVKSLLTSMYVKEFLISSSQDGHQWTLFFQNGKVKVFQGNQDSFTPVVNSLDPPLLTRYLRIHPQSWVHQIALRMEVLGCEAQDLY

SEQ ID NO: 15 - protein, 1357 aa, Artificial sequence
  amino acid sequence of a Factor VIII deletion variant
ATRRYYLGAVELSWDYMQSDLGELPVDARFPPRVPKSFPFNTSVVYKKTLFVEFTDHLFNIAKPRPPWMGLLGPTIQAEVYDTVVITLKNMASHPVSLHAVGVSYWKASEGAEYDDQTSQREKEDDKVFPGGSHTYVWQVLKENGPMASDPLCLTYSYLSHVDLVKDLNSGLIGALLVCREGSLAKEKTQTLHKFILLFAVFDEGKSWHSETKNSLMQDRDAASARAWPKMHTVNGYVNRSLPGLIGCHRKSVYWHVIGMGTTPEVHSIFLEGHTFLVRNHRQASLEISPITFLTAQTLLMDLGQFLLFCHISSHQHDGMEAYVKVDSCPEEPQLRMKNNEEAEDYDDDLTDSEMDVVRFDDDNSPSFIQIRSVAKKHPKTWVHYIAAEEEDWDYAPLVLAPDDRSYKSQYLNNGPQRIGRKYKKVRFMAYTDETFKTREAIQHESGILGPLLYGEVGDTLLIIFKNQASRPYNIYPHGITDVRPLYSRRLPKGVKHLKDFPILPGEIFKYKWTVTVEDGPTKSDPRCLTRYYSSFVNMERDLASGLIGPLLICYKESVDQRGNQIMSDKRNVILFSVFDENRSWYLTENIQRFLPNPAGVQLEDPEFQASNIMHSINGYVFDSLQLSVCLHEVAYWYILSIGAQTDFLSVFFSGYTFKHKMVYEDTLTLFPFSGETVFMSMENPGLWILGCHNSDFRNRGMTALLKVSSCDKRSFQKKTRHYFIAAVERLWDYGMSSSPHVLRNRAQSGSVPQFKKVVFQEFTDGSFTQPLYRGELNEHLGLLGPYIRAEVEDNIMVTFRNQASRPYSFYSSLISYEEDQRQGAEPRKNFVKPNETKTYFWKVQHHMAPTKDEFDCKAWAYFSDVDLEKDVHSGLIGPLLVCHTNTLNPAHGRQVTVQEFALFFTIFDETKSWYFTENMERNCRAPCNIQMEDPTFKENYRFHAINGYIMDTLPGLVMAQDQRIRWYLLSMGSNENIHSIHFSGHVFTVRKKEEYKMALYNLYPGVFETVEMLPSKAGIWRVECLIGEHLHAGMSTLFLVYSNKCQTPLGMASGHIRDFQITASGQYGQWAPKLARLHYSGSINAWSTKEPFSWIKVDLLAPMIIHGIKTQGARQKFSSLYISQFIIMYSLDGKKWQTYRGNSTGTLMVFFGNVDSSGIKHNIFNPPIIARYIRLHPTHYSIRSTLRMELMGCDLNSCSMPLGMESKAISDAQITASSYFTNMFATWSPSKARLHLQGRSNAWRPQVNNPKEWLQVDFQKTMKVTGVTTQGVKSLLTSMYVKEFLISSSQDGHQWTLFFQNGKVKVFQGNQDSFTPVVNSLDPPLLTRYLRIHPQSWVHQIALRMEVLGCEAQDLY

SEQ ID NO: 16 - protein, 1397 aa, Artificial sequence
  amino acid sequence of a Factor VIII deletion variant
ATRRYYLGAVELSWDYMQSDLGELPVDARFPPRVPKSFPFNTSVVYKKTLFVEFTDHLFNIAKPRPPWMGLLGPTIQAEVYDTVVITLKNMASHPVSLHAVGVSYWKASEGAEYDDQTSQREKEDDKVFPGGSHTYVWQVLKENGPMASDPLCLTYSYLSHVDLVKDLNSGLIGALLVCREGSLAKEKTQTLHKFILLFAVFDEGKSWHSETKNSLMQDRDAASARAWPKMHTVNGYVNRSLPGLIGCHRKSVYWHVIGMGTTPEVHSIFLEGHTFLVRNHRQASLEISPITFLTAQTLLMDLGQFLLFCHISSHQHDGMEAYVKVDSCPEEPQLRMKNNEEAEDYDDDLTDSEMDVVRFDDDNSPSFIQIRSVAKKHPKTWVHYIAAEEEDWDYAPLVLAPDDRSYKSQYLNNGPQRIGRKYKKVRFMAYTDETFKTREAIQHESGILGPLLYGEVGDTLLIIFKNQASRPYNIYPHGITDVRPLYSRRLPKGVKHLKDFPILPGEIFKYKWTVTVEDGPTKSDPRCLTRYYSSFVNMERDLASGLIGPLLICYKESVDQRGNQIMSDKRNVILFSVFDENRSWYLTENIQRFLPNPAGVQLEDPEFQASNIMHSINGYVFDSLQLSVCLHEVAYWYILSIGAQTDFLSVFFSGYTFKHKMVYEDTLTLFPFSGETVFMSMENPGLWILGCHNSDFRNRGMTALLKVSSCDKEITRTTLQSDQEEIDYDDTISVEMKKEDFDIYDEDENQSPRSFQKKTRHYFIAAVERLWDYGMSSSPHVLRNRAQSGSVPQFKKVVFQEFTDGSFTQPLYRGELNEHLGLLGPYIRAEVEDNIMVTFRNQASRPYSFYSSLISYEEDQRQGAEPRKNFVKPNETKTYFWKVQHHMAPTKDEFDCKAWAYFSDVDLEKDVHSGLIGPLLVCHTNTLNPAHGRQVTVQEFALFFTIFDETKSWYFTENMERNCRAPCNIQMEDPTFKENYRFHAINGYIMDTLPGLVMAQDQRIRWYLLSMGSNENIHSIHFSGHVFTVRKKEEYKMALYNLYPGVFETVEMLPSKAGIWRVECLIGEHLHAGMSTLFLVYSNKCQTPLGMASGHIRDFQITASGQYGQWAPKLARLHYSGSINAWSTKEPFSWIKVDLLAPMIIHGIKTQGARQKFSSLYISQFIIMYSLDGKKWQTYRGNSTGTLMVFFGNVDSSGIKHNIFNPPIIARYIRLHPTHYSIRSTLRMELMGCDLNSCSMPLGMESKAISDAQITASSYFTNMFATWSPSKARLHLQGRSNAWRPQVNNPKEWLQVDFQKTMKVTGVTTQGVKSLLTSMYVKEFLISSSQDGHQWTLFFQNGKVKVFQGNQDSFTPVVNSLDPPLLTRYLRIHPQSWVHQIALRMEVLGCEAQDLY

SEQ ID NO: 17 - protein, 1421 aa, Artificial sequence
  amino acid sequence of a Factor VIII deletion variant
ATRRYYLGAVELSWDYMQSDLGELPVDARFPPRVPKSFPFNTSVVYKKTLFVEFTDHLFNIAKPRPPWMGLLGPTIQAEVYDTVVITLKNMASHPVSLHAVGVSYWKASEGAEYDDQTSQREKEDDKVFPGGSHTYVWQVLKENGPMASDPLCLTYSYLSHVDLVKDLNSGLIGALLVCREGSLAKEKTQTLHKFILLFAVFDEGKSWHSETKNSLMQDRDAASARAWPKMHTVNGYVNRSLPGLIGCHRKSVYWHVIGMGTTPEVHSIFLEGHTFLVRNHRQASLEISPITFLTAQTLLMDLGQFLLFCHISSHQHDGMEAYVKVDSCPEEPQLRMKNNEEAEDYDDDLTDSEMDVVRFDDDNSPSFIQIRSVAKKHPKTWVHYIAAEEEDWDYAPLVLAPDDRSYKSQYLNNGPQRIGRKYKKVRFMAYTDETFKTREAIQHESGILGPLLYGEVGDTLLIIFKNQASRPYNIYPHGITDVRPLYSRRLPKGVKHLKDFPILPGEIFKYKWTVTVEDGPTKSDPRCLTRYYSSFVNMERDLASGLIGPLLICYKESVDQRGNQIMSDKRNVILFSVFDENRSWYLTENIQRFLPNPAGVQLEDPEFQASNIMHSINGYVFDSLQLSVCLHEVAYWYILSIGAQTDFLSVFFSGYTFKHKMVYEDTLTLFPFSGETVFMSMENPGLWILGCHNSDFRNRGMTALLKVSSCDKNTGDYYEDSYEDISAYLLSKNNAIEITRTTLQSDQEEIDYDDTISVEMKKEDFDIYDEDENQSPRSFQKKTRHYFIAAVERLWDYGMSSSPHVLRNRAQSGSVPQFKKVVFQEFTDGSFTQPLYRGELNEHLGLLGPYIRAEVEDNIMVTFRNQASRPYSFYSSLISYEEDQRQGAEPRKNFVKPNETKTYFWKVQHHMAPTKDEFDCKAWAYFSDVDLEKDVHSGLIGPLLVCHTNTLNPAHGRQVTVQEFALFFTIFDETKSWYFTENMERNCRAPCNIQMEDPTFKENYRFHAINGYIMDTLPGLVMAQDQRIRWYLLSMGSNENIHSIHFSGHVFTVRKKEEYKMALYNLYPGVFETVEMLPSKAGIWRVECLIGEHLHAGMSTLFLVYSNKCQTPLGMASGHIRDFQITASGQYGQWAPKLARLHYSGSINAWSTKEPFSWIKVDLLAPMIIHGIKTQGARQKFSSLYISQFIIMYSLDGKKWQTYRGNSTGTLMVFFGNVDSSGIKHNIFNPPIIARYIRLHPTHYSIRSTLRMELMGCDLNSCSMPLGMESKAISDAQITASSYFTNMFATWSPSKARLHLQGRSNAWRPQVNNPKEWLQVDFQKTMKVTGVTTQGVKSLLTSMYVKEFLISSSQDGHQWTLFFQNGKVKVFQGNQDSFTPVVNSLDPPLLTRYLRIHPQSWVHQIALRMEVLGCEAQDLY

SEQ ID NO: 18 - protein, 1418 aa, Artificial sequence
  amino acid sequence of a Factor VIII deletion variant
ATRRYYLGAVELSWDYMQSDLGELPVDARFPPRVPKSFPFNTSVVYKKTLFVEFTDHLFNIAKPRPPWMGLLGPTIQAEVYDTVVITLKNMASHPVSLHAVGVSYWKASEGAEYDDQTSQREKEDDKVFPGGSHTYVWQVLKENGPMASDPLCLTYSYLSHVDLVKDLNSGLIGALLVCREGSLAKEKTQTLHKFILLFAVFDEGKSWHSETKNSLMQDRDAASARAWPKMHTVNGYVNRSLPGLIGCHRKSVYWHVIGMGTTPEVHSIFLEGHTFLVRNHRQASLEISPITFLTAQTLLMDLGQFLLFCHISSHQHDGMEAYVKVDSCPEEPQLRMKNNEEAEDYDDDLTDSEMDVVRFDDDNSPSFIQIRSVAKKHPKTWVHYIAAEEEDWDYAPLVLAPDDRSYKSQYLNNGPQRIGRKYKKVRFMAYTDETFKTREAIQHESGILGPLLYGEVGDTLLIIFKNQASRPYNIYPHGITDVRPLYSRRLPKGVKHLKDFPILPGEIFKYKWTVTVEDGPTKSDPRCLTRYYSSFVNMERDLASGLIGPLLICYKESVDQRGNQIMSDKRNVILFSVFDENRSWYLTENIQRFLPNPAGVQLEDPEFQASNIMHSINGYVFDSLQLSVCLHEVAYWYILSIGAQTDFLSVFFSGYTFKHKMVYEDTLTLFPFSGETVFMSMENPGLWILGCHNSDFRNRGMTALLKVSSCDKNTGDYYEDSYEDISAYLLSKNEITRTTLQSDQEEIDYDDTISVEMKKEDFDIYDEDENQSPRSFQKKTRHYFIAAVERLWDYGMSSSPHVLRNRAQSGSVPQFKKVVFQEFTDGSFTQPLYRGELNEHLGLLGPYIRAEVEDNIMVTFRNQASRPYSFYSSLISYEEDQRQGAEPRKNFVKPNETKTYFWKVQHHMAPTKDEFDCKAWAYFSDVDLEKDVHSGLIGPLLVCHTNTLNPAHGRQVTVQEFALFFTIFDETKSWYFTENMERNCRAPCNIQMEDPTFKENYRFHAINGYIMDTLPGLVMAQDQRIRWYLLSMGSNENIHSIHFSGHVFTVRKKEEYKMALYNLYPGVFETVEMLPSKAGIWRVECLIGEHLHAGMSTLFLVYSNKCQTPLGMASGHIRDFQITASGQYGQWAPKLARLHYSGSINAWSTKEPFSWIKVDLLAPMIIHGIKTQGARQKFSSLYISQFIIMYSLDGKKWQTYRGNSTGTLMVFFGNVDSSGIKHNIFNPPIIARYIRLHPTHYSIRSTLRMELMGCDLNSCSMPLGMESKAISDAQITASSYFTNMFATWSPSKARLHLQGRSNAWRPQVNNPKEWLQVDFQKTMKVTGVTTQGVKSLLTSMYVKEFLISSSQDGHQWTLFFQNGKVKVFQGNQDSFTPVVNSLDPPLLTRYLRIHPQSWVHQIALRMEVLGCEAQDLY

SEQ ID NO: 19 - protein, 1415 aa, Artificial sequence
  amino acid sequence of a Factor VIII deletion variant
ATRRYYLGAVELSWDYMQSDLGELPVDARFPPRVPKSFPFNTSVVYKKTLFVEFTDHLFNIAKPRPPWMGLLGPTIQAEVYDTVVITLKNMASHPVSLHAVGVSYWKASEGAEYDDQTSQREKEDDKVFPGGSHTYVWQVLKENGPMASDPLCLTYSYLSHVDLVKDLNSGLIGALLVCREGSLAKEKTQTLHKFILLFAVFDEGKSWHSETKNSLMQDRDAASARAWPKMHTVNGYVNRSLPGLIGCHRKSVYWHVIGMGTTPEVHSIFLEGHTFLVRNHRQASLEISPITFLTAQTLLMDLGQFLLFCHISSHQHDGMEAYVKVDSCPEEPQLRMKNNEEAEDYDDDLTDSEMDVVRFDDDNSPSFIQIRSVAKKHPKTWVHYIAAEEEDWDYAPLVLAPDDRSYKSQYLNNGPQRIGRKYKKVRFMAYTDETFKTREAIQHESGILGPLLYGEVGDTLLIIFKNQASRPYNIYPHGITDVRPLYSRRLPKGVKHLKDFPILPGEIFKYKWTVTVEDGPTKSDPRCLTRYYSSFVNMERDLASGLIGPLLICYKESVDQRGNQIMSDKRNVILFSVFDENRSWYLTENIQRFLPNPAGVQLEDPEFQASNIMHSINGYVFDSLQLSVCLHEVAYWYILSIGAQTDFLSVFFSGYTFKHKMVYEDTLTLFPFSGETVFMSMENPGLWILGCHNSDFRNRGMTALLKVSSCDKNTGDYYEDSYEDISAYLLEITRTTLQSDQEEIDYDDTISVEMKKEDFDIYDEDENQSPRSFQKKTRHYFIAAVERLWDYGMSSSPHVLRNRAQSGSVPQFKKVVFQEFTDGSFTQPLYRGELNEHLGLLGPYIRAEVEDNIMVTFRNQASRPYSFYSSLISYEEDQRQGAEPRKNFVKPNETKTYFWKVQHHMAPTKDEFDCKAWAYFSDVDLEKDVHSGLIGPLLVCHTNTLNPAHGRQVTVQEFALFFTIFDETKSWYFTENMERNCRAPCNIQMEDPTFKENYRFHAINGYIMDTLPGLVMAQDQRIRWYLLSMGSNENIHSIHFSGHVFTVRKKEEYKMALYNLYPGVFETVEMLPSKAGIWRVECLIGEHLHAGMSTLFLVYSNKCQTPLGMASGHIRDFQITASGQYGQWAPKLARLHYSGSINAWSTKEPFSWIKVDLLAPMIIHGIKTQGARQKFSSLYISQFIIMYSLDGKKWQTYRGNSTGTLMVFFGNVDSSGIKHNIFNPPIIARYIRLHPTHYSIRSTLRMELMGCDLNSCSMPLGMESKAISDAQITASSYFTNMFATWSPSKARLHLQGRSNAWRPQVNNPKEWLQVDFQKTMKVTGVTTQGVKSLLTSMYVKEFLISSSQDGHQWTLFFQNGKVKVFQGNQDSFTPVVNSLDPPLLTRYLRIHPQSWVHQIALRMEVLGCEAQDLY

SEQ ID NO: 20 - protein, 1412 aa, Artificial sequence
  amino acid sequence of a Factor VIII deletion variant
ATRRYYLGAVELSWDYMQSDLGELPVDARFPPRVPKSFPFNTSVVYKKTLFVEFTDHLFNIAKPRPPWMGLLGPTIQAEVYDTVVITLKNMASHPVSLHAVGVSYWKASEGAEYDDQTSQREKEDDKVFPGGSHTYVWQVLKENGPMASDPLCLTYSYLSHVDLVKDLNSGLIGALLVCREGSLAKEKTQTLHKFILLFAVFDEGKSWHSETKNSLMQDRDAASARAWPKMHTVNGYVNRSLPGLIGCHRKSVYWHVIGMGTTPEVHSIFLEGHTFLVRNHRQASLEISPITFLTAQTLLMDLGQFLLFCHISSHQHDGMEAYVKVDSCPEEPQLRMKNNEEAEDYDDDLTDSEMDVVRFDDDNSPSFIQIRSVAKKHPKTWVHYIAAEEEDWDYAPLVLAPDDRSYKSQYLNNGPQRIGRKYKKVRFMAYTDETFKTREAIQHESGILGPLLYGEVGDTLLIIFKNQASRPYNIYPHGITDVRPLYSRRLPKGVKHLKDFPILPGEIFKYKWTVTVEDGPTKSDPRCLTRYYSSFVNMERDLASGLIGPLLICYKESVDQRGNQIMSDKRNVILFSVFDENRSWYLTENIQRFLPNPAGVQLEDPEFQASNIMHSINGYVFDSLQLSVCLHEVAYWYILSIGAQTDFLSVFFSGYTFKHKMVYEDTLTLFPFSGETVFMSMENPGLWILGCHNSDFRNRGMTALLKVSSCDKNTGDYYEDSYEDISAEITRTTLQSDQEEIDYDDTISVEMKKEDFDIYDEDENQSPRSFQKKTRHYFIAAVERLWDYGMSSSPHVLRNRAQSGSVPQFKKVVFQEFTDGSFTQPLYRGELNEHLGLLGPYIRAEVEDNIMVTFRNQASRPYSFYSSLISYEEDQRQGAEPRKNFVKPNETKTYFWKVQHHMAPTKDEFDCKAWAYFSDVDLEKDVHSGLIGPLLVCHTNTLNPAHGRQVTVQEFALFFTIFDETKSWYFTENMERNCRAPCNIQMEDPTFKENYRFHAINGYIMDTLPGLVMAQDQRIRWYLLSMGSNENIHSIHFSGHVFTVRKKEEYKMALYNLYPGVFETVEMLPSKAGIWRVECLIGEHLHAGMSTLFLVYSNKCQTPLGMASGHIRDFQITASGQYGQWAPKLARLHYSGSINAWSTKEPFSWIKVDLLAPMIIHGIKTQGARQKFSSLYISQFIIMYSLDGKKWQTYRGNSTGTLMVFFGNVDSSGIKHNIFNPPIIARYIRLHPTHYSIRSTLRMELMGCDLNSCSMPLGMESKAISDAQITASSYFTNMFATWSPSKARLHLQGRSNAWRPQVNNPKEWLQVDFQKTMKVTGVTTQGVKSLLTSMYVKEFLISSSQDGHQWTLFFQNGKVKVFQGNQDSFTPVVNSLDPPLLTRYLRIHPQSWVHQIALRMEVLGCEAQDLY

SEQ ID NO: 21 - protein, 1409 aa, Artificial sequence
  amino acid sequence of a Factor VIII deletion variant
ATRRYYLGAVELSWDYMQSDLGELPVDARFPPRVPKSFPFNTSVVYKKTLFVEFTDHLFNIAKPRPPWMGLLGPTIQAEVYDTVVITLKNMASHPVSLHAVGVSYWKASEGAEYDDQTSQREKEDDKVFPGGSHTYVWQVLKENGPMASDPLCLTYSYLSHVDLVKDLNSGLIGALLVCREGSLAKEKTQTLHKFILLFAVFDEGKSWHSETKNSLMQDRDAASARAWPKMHTVNGYVNRSLPGLIGCHRKSVYWHVIGMGTTPEVHSIFLEGHTFLVRNHRQASLEISPITFLTAQTLLMDLGQFLLFCHISSHQHDGMEAYVKVDSCPEEPQLRMKNNEEAEDYDDDLTDSEMDVVRFDDDNSPSFIQIRSVAKKHPKTWVHYIAAEEEDWDYAPLVLAPDDRSYKSQYLNNGPQRIGRKYKKVRFMAYTDETFKTREAIQHESGILGPLLYGEVGDTLLIIFKNQASRPYNIYPHGITDVRPLYSRRLPKGVKHLKDFPILPGEIFKYKWTVTVEDGPTKSDPRCLTRYYSSFVNMERDLASGLIGPLLICYKESVDQRGNQIMSDKRNVILFSVFDENRSWYLTENIQRFLPNPAGVQLEDPEFQASNIMHSINGYVFDSLQLSVCLHEVAYWYILSIGAQTDFLSVFFSGYTFKHKMVYEDTLTLFPFSGETVFMSMENPGLWILGCHNSDFRNRGMTALLKVSSCDKNTGDYYEDSYEDEITRTTLQSDQEEIDYDDTISVEMKKEDFDIYDEDENQSPRSFQKKTRHYFIAAVERLWDYGMSSSPHVLRNRAQSGSVPQFKKVVFQEFTDGSFTQPLYRGELNEHLGLLGPYIRAEVEDNIMVTFRNQASRPYSFYSSLISYEEDQRQGAEPRKNFVKPNETKTYFWKVQHHMAPTKDEFDCKAWAYFSDVDLEKDVHSGLIGPLLVCHTNTLNPAHGRQVTVQEFALFFTIFDETKSWYFTENMERNCRAPCNIQMEDPTFKENYRFHAINGYIMDTLPGLVMAQDQRIRWYLLSMGSNENIHSIHFSGHVFTVRKKEEYKMALYNLYPGVFETVEMLPSKAGIWRVECLIGEHLHAGMSTLFLVYSNKCQTPLGMASGHIRDFQITASGQYGQWAPKLARLHYSGSINAWSTKEPFSWIKVDLLAPMIIHGIKTQGARQKFSSLYISQFIIMYSLDGKKWQTYRGNSTGTLMVFFGNVDSSGIKHNIFNPPIIARYIRLHPTHYSIRSTLRMELMGCDLNSCSMPLGMESKAISDAQITASSYFTNMFATWSPSKARLHLQGRSNAWRPQVNNPKEWLQVDFQKTMKVTGVTTQGVKSLLTSMYVKEFLISSSQDGHQWTLFFQNGKVKVFQGNQDSFTPVVNSLDPPLLTRYLRIHPQSWVHQIALRMEVLGCEAQDLY

SEQ ID NO: 22 - protein, 1406 aa, Artificial sequence
  amino acid sequence of a Factor VIII deletion variant
ATRRYYLGAVELSWDYMQSDLGELPVDARFPPRVPKSFPFNTSVVYKKTLFVEFTDHLFNIAKPRPPWMGLLGPTIQAEVYDTVVITLKNMASHPVSLHAVGVSYWKASEGAEYDDQTSQREKEDDKVFPGGSHTYVWQVLKENGPMASDPLCLTYSYLSHVDLVKDLNSGLIGALLVCREGSLAKEKTQTLHKFILLFAVFDEGKSWHSETKNSLMQDRDAASARAWPKMHTVNGYVNRSLPGLIGCHRKSVYWHVIGMGTTPEVHSIFLEGHTFLVRNHRQASLEISPITFLTAQTLLMDLGQFLLFCHISSHQHDGMEAYVKVDSCPEEPQLRMKNNEEAEDYDDDLTDSEMDVVRFDDDNSPSFIQIRSVAKKHPKTWVHYIAAEEEDWDYAPLVLAPDDRSYKSQYLNNGPQRIGRKYKKVRFMAYTDETFKTREAIQHESGILGPLLYGEVGDTLLIIFKNQASRPYNIYPHGITDVRPLYSRRLPKGVKHLKDFPILPGEIFKYKWTVTVEDGPTKSDPRCLTRYYSSFVNMERDLASGLIGPLLICYKESVDQRGNQIMSDKRNVILFSVFDENRSWYLTENIQRFLPNPAGVQLEDPEFQASNIMHSINGYVFDSLQLSVCLHEVAYWYILSIGAQTDFLSVFFSGYTFKHKMVYEDTLTLFPFSGETVFMSMENPGLWILGCHNSDFRNRGMTALLKVSSCDKNTGDYYEDSEITRTTLQSDQEEIDYDDTISVEMKKEDFDIYDEDENQSPRSFQKKTRHYFIAAVERLWDYGMSSSPHVLRNRAQSGSVPQFKKVVFQEFTDGSFTQPLYRGELNEHLGLLGPYIRAEVEDNIMVTFRNQASRPYSFYSSLISYEEDQRQGAEPRKNFVKPNETKTYFWKVQHHMAPTKDEFDCKAWAYFSDVDLEKDVHSGLIGPLLVCHTNTLNPAHGRQVTVQEFALFFTIFDETKSWYFTENMERNCRAPCNIQMEDPTFKENYRFHAINGYIMDTLPGLVMAQDQRIRWYLLSMGSNENIHSIHFSGHVFTVRKKEEYKMALYNLYPGVFETVEMLPSKAGIWRVECLIGEHLHAGMSTLFLVYSNKCQTPLGMASGHIRDFQITASGQYGQWAPKLARLHYSGSINAWSTKEPFSWIKVDLLAPMIIHGIKTQGARQKFSSLYISQFIIMYSLDGKKWQTYRGNSTGTLMVFFGNVDSSGIKHNIFNPPIIARYIRLHPTHYSIRSTLRMELMGCDLNSCSMPLGMESKAISDAQITASSYFTNMFATWSPSKARLHLQGRSNAWRPQVNNPKEWLQVDFQKTMKVTGVTTQGVKSLLTSMYVKEFLISSSQDGHQWTLFFQNGKVKVFQGNQDSFTPVVNSLDPPLLTRYLRIHPQSWVHQIALRMEVLGCEAQDLY

SEQ ID NO: 23 - protein, 1403 aa, Artificial sequence
  amino acid sequence of a Factor VIII deletion variant
ATRRYYLGAVELSWDYMQSDLGELPVDARFPPRVPKSFPFNTSVVYKKTLFVEFTDHLFNIAKPRPPWMGLLGPTIQAEVYDTVVITLKNMASHPVSLHAVGVSYWKASEGAEYDDQTSQREKEDDKVFPGGSHTYVWQVLKENGPMASDPLCLTYSYLSHVDLVKDLNSGLIGALLVCREGSLAKEKTQTLHKFILLFAVFDEGKSWHSETKNSLMQDRDAASARAWPKMHTVNGYVNRSLPGLIGCHRKSVYWHVIGMGTTPEVHSIFLEGHTFLVRNHRQASLEISPITFLTAQTLLMDLGQFLLFCHISSHQHDGMEAYVKVDSCPEEPQLRMKNNEEAEDYDDDLTDSEMDVVRFDDDNSPSFIQIRSVAKKHPKTWVHYIAAEEEDWDYAPLVLAPDDRSYKSQYLNNGPQRIGRKYKKVRFMAYTDETFKTREAIQHESGILGPLLYGEVGDTLLIIFKNQASRPYNIYPHGITDVRPLYSRRLPKGVKHLKDFPILPGEIFKYKWTVTVEDGPTKSDPRCLTRYYSSFVNMERDLASGLIGPLLICYKESVDQRGNQIMSDKRNVILFSVFDENRSWYLTENIQRFLPNPAGVQLEDPEFQASNIMHSINGYVFDSLQLSVCLHEVAYWYILSIGAQTDFLSVFFSGYTFKHKMVYEDTLTLFPFSGETVFMSMENPGLWILGCHNSDFRNRGMTALLKVSSCDKNTGDYYEITRTTLQSDQEEIDYDDTISVEMKKEDFDIYDEDENQSPRSFQKKTRHYFIAAVERLWDYGMSSSPHVLRNRAQSGSVPQFKKVVFQEFTDGSFTQPLYRGELNEHLGLLGPYIRAEVEDNIMVTFRNQASRPYSFYSSLISYEEDQRQGAEPRKNFVKPNETKTYFWKVQHHMAPTKDEFDCKAWAYFSDVDLEKDVHSGLIGPLLVCHTNTLNPAHGRQVTVQEFALFFTIFDETKSWYFTENMERNCRAPCNIQMEDPTFKENYRFHAINGYIMDTLPGLVMAQDQRIRWYLLSMGSNENIHSIHFSGHVFTVRKKEEYKMALYNLYPGVFETVEMLPSKAGIWRVECLIGEHLHAGMSTLFLVYSNKCQTPLGMASGHIRDFQITASGQYGQWAPKLARLHYSGSINAWSTKEPFSWIKVDLLAPMIIHGIKTQGARQKFSSLYISQFIIMYSLDGKKWQTYRGNSTGTLMVFFGNVDSSGIKHNIFNPPIIARYIRLHPTHYSIRSTLRMELMGCDLNSCSMPLGMESKAISDAQITASSYFTNMFATWSPSKARLHLQGRSNAWRPQVNNPKEWLQVDFQKTMKVTGVTTQGVKSLLTSMYVKEFLISSSQDGHQWTLFFQNGKVKVFQGNQDSFTPVVNSLDPPLLTRYLRIHPQSWVHQIALRMEVLGCEAQDLY

SEQ ID NO: 24 - protein, 1400 aa, Artificial sequence
  amino acid sequence of a Factor VIII deletion variant
ATRRYYLGAVELSWDYMQSDLGELPVDARFPPRVPKSFPFNTSVVYKKTLFVEFTDHLFNIAKPRPPWMGLLGPTIQAEVYDTVVITLKNMASHPVSLHAVGVSYWKASEGAEYDDQTSQREKEDDKVFPGGSHTYVWQVLKENGPMASDPLCLTYSYLSHVDLVKDLNSGLIGALLVCREGSLAKEKTQTLHKFILLFAVFDEGKSWHSETKNSLMQDRDAASARAWPKMHTVNGYVNRSLPGLIGCHRKSVYWHVIGMGTTPEVHSIFLEGHTFLVRNHRQASLEISPITFLTAQTLLMDLGQFLLFCHISSHQHDGMEAYVKVDSCPEEPQLRMKNNEEAEDYDDDLTDSEMDVVRFDDDNSPSFIQIRSVAKKHPKTWVHYIAAEEEDWDYAPLVLAPDDRSYKSQYLNNGPQRIGRKYKKVRFMAYTDETFKTREAIQHESGILGPLLYGEVGDTLLIIFKNQASRPYNIYPHGITDVRPLYSRRLPKGVKHLKDFPILPGEIFKYKWTVTVEDGPTKSDPRCLTRYYSSFVNMERDLASGLIGPLLICYKESVDQRGNQIMSDKRNVILFSVFDENRSWYLTENIQRFLPNPAGVQLEDPEFQASNIMHSINGYVFDSLQLSVCLHEVAYWYILSIGAQTDFLSVFFSGYTFKHKMVYEDTLTLFPFSGETVFMSMENPGLWILGCHNSDFRNRGMTALLKVSSCDKNTGEITRTTLQSDQEEIDYDDTISVEMKKEDFDIYDEDENQSPRSFQKKTRHYFIAAVERLWDYGMSSSPHVLRNRAQSGSVPQFKKVVFQEFTDGSFTQPLYRGELNEHLGLLGPYIRAEVEDNIMVTFRNQASRPYSFYSSLISYEEDQRQGAEPRKNFVKPNETKTYFWKVQHHMAPTKDEFDCKAWAYFSDVDLEKDVHSGLIGPLLVCHTNTLNPAHGRQVTVQEFALFFTIFDETKSWYFTENMERNCRAPCNIQMEDPTFKENYRFHAINGYIMDTLPGLVMAQDQRIRWYLLSMGSNENIHSIHFSGHVFTVRKKEEYKMALYNLYPGVFETVEMLPSKAGIWRVECLIGEHLHAGMSTLFLVYSNKCQTPLGMASGHIRDFQITASGQYGQWAPKLARLHYSGSINAWSTKEPFSWIKVDLLAPMIIHGIKTQGARQKFSSLYISQFIIMYSLDGKKWQTYRGNSTGTLMVFFGNVDSSGIKHNIFNPPIIARYIRLHPTHYSIRSTLRMELMGCDLNSCSMPLGMESKAISDAQITASSYFTNMFATWSPSKARLHLQGRSNAWRPQVNNPKEWLQVDFQKTMKVTGVTTQGVKSLLTSMYVKEFLISSSQDGHQWTLFFQNGKVKVFQGNQDSFTPVVNSLDPPLLTRYLRIHPQSWVHQIALRMEVLGCEAQDLY

SEQ ID NO: 25 - protein, 1418 aa, Artificial sequence
  amino acid sequence of a Factor VIII deletion variant
ATRRYYLGAVELSWDYMQSDLGELPVDARFPPRVPKSFPFNTSVVYKKTLFVEFTDHLFNIAKPRPPWMGLLGPTIQAEVYDTVVITLKNMASHPVSLHAVGVSYWKASEGAEYDDQTSQREKEDDKVFPGGSHTYVWQVLKENGPMASDPLCLTYSYLSHVDLVKDLNSGLIGALLVCREGSLAKEKTQTLHKFILLFAVFDEGKSWHSETKNSLMQDRDAASARAWPKMHTVNGYVNRSLPGLIGCHRKSVYWHVIGMGTTPEVHSIFLEGHTFLVRNHRQASLEISPITFLTAQTLLMDLGQFLLFCHISSHQHDGMEAYVKVDSCPEEPQLRMKNNEEAEDYDDDLTDSEMDVVRFDDDNSPSFIQIRSVAKKHPKTWVHYIAAEEEDWDYAPLVLAPDDRSYKSQYLNNGPQRIGRKYKKVRFMAYTDETFKTREAIQHESGILGPLLYGEVGDTLLIIFKNQASRPYNIYPHGITDVRPLYSRRLPKGVKHLKDFPILPGEIFKYKWTVTVEDGPTKSDPRCLTRYYSSFVNMERDLASGLIGPLLICYKESVDQRGNQIMSDKRNVILFSVFDENRSWYLTENIQRFLPNPAGVQLEDPEFQASNIMHSINGYVFDSLQLSVCLHEVAYWYILSIGAQTDFLSVFFSGYTFKHKMVYEDTLTLFPFSGETVFMSMENPGLWILGCHNSDFRNRGMTALLKVSSCDKNTGDYYEDSYEDISAYLLSKNNAIRTTLQSDQEEIDYDDTISVEMKKEDFDIYDEDENQSPRSFQKKTRHYFIAAVERLWDYGMSSSPHVLRNRAQSGSVPQFKKVVFQEFTDGSFTQPLYRGELNEHLGLLGPYIRAEVEDNIMVTFRNQASRPYSFYSSLISYEEDQRQGAEPRKNFVKPNETKTYFWKVQHHMAPTKDEFDCKAWAYFSDVDLEKDVHSGLIGPLLVCHTNTLNPAHGRQVTVQEFALFFTIFDETKSWYFTENMERNCRAPCNIQMEDPTFKENYRFHAINGYIMDTLPGLVMAQDQRIRWYLLSMGSNENIHSIHFSGHVFTVRKKEEYKMALYNLYPGVFETVEMLPSKAGIWRVECLIGEHLHAGMSTLFLVYSNKCQTPLGMASGHIRDFQITASGQYGQWAPKLARLHYSGSINAWSTKEPFSWIKVDLLAPMIIHGIKTQGARQKFSSLYISQFIIMYSLDGKKWQTYRGNSTGTLMVFFGNVDSSGIKHNIFNPPIIARYIRLHPTHYSIRSTLRMELMGCDLNSCSMPLGMESKAISDAQITASSYFTNMFATWSPSKARLHLQGRSNAWRPQVNNPKEWLQVDFQKTMKVTGVTTQGVKSLLTSMYVKEFLISSSQDGHQWTLFFQNGKVKVFQGNQDSFTPVVNSLDPPLLTRYLRIHPQSWVHQIALRMEVLGCEAQDLY

SEQ ID NO: 26 - protein, 1415 aa, Artificial sequence
  amino acid sequence of a Factor VIII deletion variant
ATRRYYLGAVELSWDYMQSDLGELPVDARFPPRVPKSFPFNTSVVYKKTLFVEFTDHLFNIAKPRPPWMGLLGPTIQAEVYDTVVITLKNMASHPVSLHAVGVSYWKASEGAEYDDQTSQREKEDDKVFPGGSHTYVWQVLKENGPMASDPLCLTYSYLSHVDLVKDLNSGLIGALLVCREGSLAKEKTQTLHKFILLFAVFDEGKSWHSETKNSLMQDRDAASARAWPKMHTVNGYVNRSLPGLIGCHRKSVYWHVIGMGTTPEVHSIFLEGHTFLVRNHRQASLEISPITFLTAQTLLMDLGQFLLFCHISSHQHDGMEAYVKVDSCPEEPQLRMKNNEEAEDYDDDLTDSEMDVVRFDDDNSPSFIQIRSVAKKHPKTWVHYIAAEEEDWDYAPLVLAPDDRSYKSQYLNNGPQRIGRKYKKVRFMAYTDETFKTREAIQHESGILGPLLYGEVGDTLLIIFKNQASRPYNIYPHGITDVRPLYSRRLPKGVKHLKDFPILPGEIFKYKWTVTVEDGPTKSDPRCLTRYYSSFVNMERDLASGLIGPLLICYKESVDQRGNQIMSDKRNVILFSVFDENRSWYLTENIQRFLPNPAGVQLEDPEFQASNIMHSINGYVFDSLQLSVCLHEVAYWYILSIGAQTDFLSVFFSGYTFKHKMVYEDTLTLFPFSGETVFMSMENPGLWILGCHNSDFRNRGMTALLKVSSCDKNTGDYYEDSYEDISAYLLSKNNAILQSDQEEIDYDDTISVEMKKEDFDIYDEDENQSPRSFQKKTRHYFIAAVERLWDYGMSSSPHVLRNRAQSGSVPQFKKVVFQEFTDGSFTQPLYRGELNEHLGLLGPYIRAEVEDNIMVTFRNQASRPYSFYSSLISYEEDQRQGAEPRKNFVKPNETKTYFWKVQHHMAPTKDEFDCKAWAYFSDVDLEKDVHSGLIGPLLVCHTNTLNPAHGRQVTVQEFALFFTIFDETKSWYFTENMERNCRAPCNIQMEDPTFKENYRFHAINGYIMDTLPGLVMAQDQRIRWYLLSMGSNENIHSIHFSGHVFTVRKKEEYKMALYNLYPGVFETVEMLPSKAGIWRVECLIGEHLHAGMSTLFLVYSNKCQTPLGMASGHIRDFQITASGQYGQWAPKLARLHYSGSINAWSTKEPFSWIKVDLLAPMIIHGIKTQGARQKFSSLYISQFIIMYSLDGKKWQTYRGNSTGTLMVFFGNVDSSGIKHNIFNPPIIARYIRLHPTHYSIRSTLRMELMGCDLNSCSMPLGMESKAISDAQITASSYFTNMFATWSPSKARLHLQGRSNAWRPQVNNPKEWLQVDFQKTMKVTGVTTQGVKSLLTSMYVKEFLISSSQDGHQWTLFFQNGKVKVFQGNQDSFTPVVNSLDPPLLTRYLRIHPQSWVHQIALRMEVLGCEAQDLY

SEQ ID NO: 27 - protein, 1412 aa, Artificial sequence
  amino acid sequence of a Factor VIII deletion variant
ATRRYYLGAVELSWDYMQSDLGELPVDARFPPRVPKSFPFNTSVVYKKTLFVEFTDHLFNIAKPRPPWMGLLGPTIQAEVYDTVVITLKNMASHPVSLHAVGVSYWKASEGAEYDDQTSQREKEDDKVFPGGSHTYVWQVLKENGPMASDPLCLTYSYLSHVDLVKDLNSGLIGALLVCREGSLAKEKTQTLHKFILLFAVFDEGKSWHSETKNSLMQDRDAASARAWPKMHTVNGYVNRSLPGLIGCHRKSVYWHVIGMGTTPEVHSIFLEGHTFLVRNHRQASLEISPITFLTAQTLLMDLGQFLLFCHISSHQHDGMEAYVKVDSCPEEPQLRMKNNEEAEDYDDDLTDSEMDVVRFDDDNSPSFIQIRSVAKKHPKTWVHYIAAEEEDWDYAPLVLAPDDRSYKSQYLNNGPQRIGRKYKKVRFMAYTDETFKTREAIQHESGILGPLLYGEVGDTLLIIFKNQASRPYNIYPHGITDVRPLYSRRLPKGVKHLKDFPILPGEIFKYKWTVTVEDGPTKSDPRCLTRYYSSFVNMERDLASGLIGPLLICYKESVDQRGNQIMSDKRNVILFSVFDENRSWYLTENIQRFLPNPAGVQLEDPEFQASNIMHSINGYVFDSLQLSVCLHEVAYWYILSIGAQTDFLSVFFSGYTFKHKMVYEDTLTLFPFSGETVFMSMENPGLWILGCHNSDFRNRGMTALLKVSSCDKNTGDYYEDSYEDISAYLLSKNNAIDQEEIDYDDTISVEMKKEDFDIYDEDENQSPRSFQKKTRHYFIAAVERLWDYGMSSSPHVLRNRAQSGSVPQFKKVVFQEFTDGSFTQPLYRGELNEHLGLLGPYIRAEVEDNIMVTFRNQASRPYSFYSSLISYEEDQRQGAEPRKNFVKPNETKTYFWKVQHHMAPTKDEFDCKAWAYFSDVDLEKDVHSGLIGPLLVCHTNTLNPAHGRQVTVQEFALFFTIFDETKSWYFTENMERNCRAPCNIQMEDPTFKENYRFHAINGYIMDTLPGLVMAQDQRIRWYLLSMGSNENIHSIHFSGHVFTVRKKEEYKMALYNLYPGVFETVEMLPSKAGIWRVECLIGEHLHAGMSTLFLVYSNKCQTPLGMASGHIRDFQITASGQYGQWAPKLARLHYSGSINAWSTKEPFSWIKVDLLAPMIIHGIKTQGARQKFSSLYISQFIIMYSLDGKKWQTYRGNSTGTLMVFFGNVDSSGIKHNIFNPPIIARYIRLHPTHYSIRSTLRMELMGCDLNSCSMPLGMESKAISDAQITASSYFTNMFATWSPSKARLHLQGRSNAWRPQVNNPKEWLQVDFQKTMKVTGVTTQGVKSLLTSMYVKEFLISSSQDGHQWTLFFQNGKVKVFQGNQDSFTPVVNSLDPPLLTRYLRIHPQSWVHQIALRMEVLGCEAQDLY

SEQ ID NO: 28 - protein, 1409 aa, Artificial sequence
  amino acid sequence of a Factor VIII deletion variant
ATRRYYLGAVELSWDYMQSDLGELPVDARFPPRVPKSFPFNTSVVYKKTLFVEFTDHLFNIAKPRPPWMGLLGPTIQAEVYDTVVITLKNMASHPVSLHAVGVSYWKASEGAEYDDQTSQREKEDDKVFPGGSHTYVWQVLKENGPMASDPLCLTYSYLSHVDLVKDLNSGLIGALLVCREGSLAKEKTQTLHKFILLFAVFDEGKSWHSETKNSLMQDRDAASARAWPKMHTVNGYVNRSLPGLIGCHRKSVYWHVIGMGTTPEVHSIFLEGHTFLVRNHRQASLEISPITFLTAQTLLMDLGQFLLFCHISSHQHDGMEAYVKVDSCPEEPQLRMKNNEEAEDYDDDLTDSEMDVVRFDDDNSPSFIQIRSVAKKHPKTWVHYIAAEEEDWDYAPLVLAPDDRSYKSQYLNNGPQRIGRKYKKVRFMAYTDETFKTREAIQHESGILGPLLYGEVGDTLLIIFKNQASRPYNIYPHGITDVRPLYSRRLPKGVKHLKDFPILPGEIFKYKWTVTVEDGPTKSDPRCLTRYYSSFVNMERDLASGLIGPLLICYKESVDQRGNQIMSDKRNVILFSVFDENRSWYLTENIQRFLPNPAGVQLEDPEFQASNIMHSINGYVFDSLQLSVCLHEVAYWYILSIGAQTDFLSVFFSGYTFKHKMVYEDTLTLFPFSGETVFMSMENPGLWILGCHNSDFRNRGMTALLKVSSCDKNTGDYYEDSYEDISAYLLSKNNAIEIDYDDTISVEMKKEDFDIYDEDENQSPRSFQKKTRHYFIAAVERLWDYGMSSSPHVLRNRAQSGSVPQFKKVVFQEFTDGSFTQPLYRGELNEHLGLLGPYIRAEVEDNIMVTFRNQASRPYSFYSSLISYEEDQRQGAEPRKNFVKPNETKTYFWKVQHHMAPTKDEFDCKAWAYFSDVDLEKDVHSGLIGPLLVCHTNTLNPAHGRQVTVQEFALFFTIFDETKSWYFTENMERNCRAPCNIQMEDPTFKENYRFHAINGYIMDTLPGLVMAQDQRIRWYLLSMGSNENIHSIHFSGHVFTVRKKEEYKMALYNLYPGVFETVEMLPSKAGIWRVECLIGEHLHAGMSTLFLVYSNKCQTPLGMASGHIRDFQITASGQYGQWAPKLARLHYSGSINAWSTKEPFSWIKVDLLAPMIIHGIKTQGARQKFSSLYISQFIIMYSLDGKKWQTYRGNSTGTLMVFFGNVDSSGIKHNIFNPPIIARYIRLHPTHYSIRSTLRMELMGCDLNSCSMPLGMESKAISDAQITASSYFTNMFATWSPSKARLHLQGRSNAWRPQVNNPKEWLQVDFQKTMKVTGVTTQGVKSLLTSMYVKEFLISSSQDGHQWTLFFQNGKVKVFQGNQDSFTPVVNSLDPPLLTRYLRIHPQSWVHQIALRMEVLGCEAQDLY

SEQ ID NO: 29 - protein, 1406 aa, Artificial sequence
  amino acid sequence of a Factor VIII deletion variant
ATRRYYLGAVELSWDYMQSDLGELPVDARFPPRVPKSFPFNTSVVYKKTLFVEFTDHLFNIAKPRPPWMGLLGPTIQAEVYDTVVITLKNMASHPVSLHAVGVSYWKASEGAEYDDQTSQREKEDDKVFPGGSHTYVWQVLKENGPMASDPLCLTYSYLSHVDLVKDLNSGLIGALLVCREGSLAKEKTQTLHKFILLFAVFDEGKSWHSETKNSLMQDRDAASARAWPKMHTVNGYVNRSLPGLIGCHRKSVYWHVIGMGTTPEVHSIFLEGHTFLVRNHRQASLEISPITFLTAQTLLMDLGQFLLFCHISSHQHDGMEAYVKVDSCPEEPQLRMKNNEEAEDYDDDLTDSEMDVVRFDDDNSPSFIQIRSVAKKHPKTWVHYIAAEEEDWDYAPLVLAPDDRSYKSQYLNNGPQRIGRKYKKVRFMAYTDETFKTREAIQHESGILGPLLYGEVGDTLLIIFKNQASRPYNIYPHGITDVRPLYSRRLPKGVKHLKDFPILPGEIFKYKWTVTVEDGPTKSDPRCLTRYYSSFVNMERDLASGLIGPLLICYKESVDQRGNQIMSDKRNVILFSVFDENRSWYLTENIQRFLPNPAGVQLEDPEFQASNIMHSINGYVFDSLQLSVCLHEVAYWYILSIGAQTDFLSVFFSGYTFKHKMVYEDTLTLFPFSGETVFMSMENPGLWILGCHNSDFRNRGMTALLKVSSCDKNTGDYYEDSYEDISAYLLSKNNAIYDDTISVEMKKEDFDIYDEDENQSPRSFQKKTRHYFIAAVERLWDYGMSSSPHVLRNRAQSGSVPQFKKVVFQEFTDGSFTQPLYRGELNEHLGLLGPYIRAEVEDNIMVTFRNQASRPYSFYSSLISYEEDQRQGAEPRKNFVKPNETKTYFWKVQHHMAPTKDEFDCKAWAYFSDVDLEKDVHSGLIGPLLVCHTNTLNPAHGRQVTVQEFALFFTIFDETKSWYFTENMERNCRAPCNIQMEDPTFKENYRFHAINGYIMDTLPGLVMAQDQRIRWYLLSMGSNENIHSIHFSGHVFTVRKKEEYKMALYNLYPGVFETVEMLPSKAGIWRVECLIGEHLHAGMSTLFLVYSNKCQTPLGMASGHIRDFQITASGQYGQWAPKLARLHYSGSINAWSTKEPFSWIKVDLLAPMIIHGIKTQGARQKFSSLYISQFIIMYSLDGKKWQTYRGNSTGTLMVFFGNVDSSGIKHNIFNPPIIARYIRLHPTHYSIRSTLRMELMGCDLNSCSMPLGMESKAISDAQITASSYFTNMFATWSPSKARLHLQGRSNAWRPQVNNPKEWLQVDFQKTMKVTGVTTQGVKSLLTSMYVKEFLISSSQDGHQWTLFFQNGKVKVFQGNQDSFTPVVNSLDPPLLTRYLRIHPQSWVHQIALRMEVLGCEAQDLY

SEQ ID NO: 30 - protein, 1403 aa, Artificial sequence
  amino acid sequence of a Factor VIII deletion variant
ATRRYYLGAVELSWDYMQSDLGELPVDARFPPRVPKSFPFNTSVVYKKTLFVEFTDHLFNIAKPRPPWMGLLGPTIQAEVYDTVVITLKNMASHPVSLHAVGVSYWKASEGAEYDDQTSQREKEDDKVFPGGSHTYVWQVLKENGPMASDPLCLTYSYLSHVDLVKDLNSGLIGALLVCREGSLAKEKTQTLHKFILLFAVFDEGKSWHSETKNSLMQDRDAASARAWPKMHTVNGYVNRSLPGLIGCHRKSVYWHVIGMGTTPEVHSIFLEGHTFLVRNHRQASLEISPITFLTAQTLLMDLGQFLLFCHISSHQHDGMEAYVKVDSCPEEPQLRMKNNEEAEDYDDDLTDSEMDVVRFDDDNSPSFIQIRSVAKKHPKTWVHYIAAEEEDWDYAPLVLAPDDRSYKSQYLNNGPQRIGRKYKKVRFMAYTDETFKTREAIQHESGILGPLLYGEVGDTLLIIFKNQASRPYNIYPHGITDVRPLYSRRLPKGVKHLKDFPILPGEIFKYKWTVTVEDGPTKSDPRCLTRYYSSFVNMERDLASGLIGPLLICYKESVDQRGNQIMSDKRNVILFSVFDENRSWYLTENIQRFLPNPAGVQLEDPEFQASNIMHSINGYVFDSLQLSVCLHEVAYWYILSIGAQTDFLSVFFSGYTFKHKMVYEDTLTLFPFSGETVFMSMENPGLWILGCHNSDFRNRGMTALLKVSSCDKNTGDYYEDSYEDISAYLLSKNNAITISVEMKKEDFDIYDEDENQSPRSFQKKTRHYFIAAVERLWDYGMSSSPHVLRNRAQSGSVPQFKKVVFQEFTDGSFTQPLYRGELNEHLGLLGPYIRAEVEDNIMVTFRNQASRPYSFYSSLISYEEDQRQGAEPRKNFVKPNETKTYFWKVQHHMAPTKDEFDCKAWAYFSDVDLEKDVHSGLIGPLLVCHTNTLNPAHGRQVTVQEFALFFTIFDETKSWYFTENMERNCRAPCNIQMEDPTFKENYRFHAINGYIMDTLPGLVMAQDQRIRWYLLSMGSNENIHSIHFSGHVFTVRKKEEYKMALYNLYPGVFETVEMLPSKAGIWRVECLIGEHLHAGMSTLFLVYSNKCQTPLGMASGHIRDFQITASGQYGQWAPKLARLHYSGSINAWSTKEPFSWIKVDLLAPMIIHGIKTQGARQKFSSLYISQFIIMYSLDGKKWQTYRGNSTGTLMVFFGNVDSSGIKHNIFNPPIIARYIRLHPTHYSIRSTLRMELMGCDLNSCSMPLGMESKAISDAQITASSYFTNMFATWSPSKARLHLQGRSNAWRPQVNNPKEWLQVDFQKTMKVTGVTTQGVKSLLTSMYVKEFLISSSQDGHQWTLFFQNGKVKVFQGNQDSFTPVVNSLDPPLLTRYLRIHPQSWVHQIALRMEVLGCEAQDLY

SEQ ID NO: 31 - protein, 1394 aa, Artificial sequence
  amino acid sequence of a Factor VIII deletion variant
ATRRYYLGAVELSWDYMQSDLGELPVDARFPPRVPKSFPFNTSVVYKKTLFVEFTDHLFNIAKPRPPWMGLLGPTIQAEVYDTVVITLKNMASHPVSLHAVGVSYWKASEGAEYDDQTSQREKEDDKVFPGGSHTYVWQVLKENGPMASDPLCLTYSYLSHVDLVKDLNSGLIGALLVCREGSLAKEKTQTLHKFILLFAVFDEGKSWHSETKNSLMQDRDAASARAWPKMHTVNGYVNRSLPGLIGCHRKSVYWHVIGMGTTPEVHSIFLEGHTFLVRNHRQASLEISPITFLTAQTLLMDLGQFLLFCHISSHQHDGMEAYVKVDSCPEEPQLRMKNNEEAEDYDDDLTDSEMDVVRFDDDNSPSFIQIRSVAKKHPKTWVHYIAAEEEDWDYAPLVLAPDDRSYKSQYLNNGPQRIGRKYKKVRFMAYTDETFKTREAIQHESGILGPLLYGEVGDTLLIIFKNQASRPYNIYPHGITDVRPLYSRRLPKGVKHLKDFPILPGEIFKYKWTVTVEDGPTKSDPRCLTRYYSSFVNMERDLASGLIGPLLICYKESVDQRGNQIMSDKRNVILFSVFDENRSWYLTENIQRFLPNPAGVQLEDPEFQASNIMHSINGYVFDSLQLSVCLHEVAYWYILSIGAQTDFLSVFFSGYTFKHKMVYEDTLTLFPFSGETVFMSMENPGLWILGCHNSDFRNRGMTALLKVSSCDKNTGDYYEDSYEDISAYLLVEMKKEDFDIYDEDENQSPRSFQKKTRHYFIAAVERLWDYGMSSSPHVLRNRAQSGSVPQFKKVVFQEFTDGSFTQPLYRGELNEHLGLLGPYIRAEVEDNIMVTFRNQASRPYSFYSSLISYEEDQRQGAEPRKNFVKPNETKTYFWKVQHHMAPTKDEFDCKAWAYFSDVDLEKDVHSGLIGPLLVCHTNTLNPAHGRQVTVQEFALFFTIFDETKSWYFTENMERNCRAPCNIQMEDPTFKENYRFHAINGYIMDTLPGLVMAQDQRIRWYLLSMGSNENIHSIHFSGHVFTVRKKEEYKMALYNLYPGVFETVEMLPSKAGIWRVECLIGEHLHAGMSTLFLVYSNKCQTPLGMASGHIRDFQITASGQYGQWAPKLARLHYSGSINAWSTKEPFSWIKVDLLAPMIIHGIKTQGARQKFSSLYISQFIIMYSLDGKKWQTYRGNSTGTLMVFFGNVDSSGIKHNIFNPPIIARYIRLHPTHYSIRSTLRMELMGCDLNSCSMPLGMESKAISDAQITASSYFTNMFATWSPSKARLHLQGRSNAWRPQVNNPKEWLQVDFQKTMKVTGVTTQGVKSLLTSMYVKEFLISSSQDGHQWTLFFQNGKVKVFQGNQDSFTPVVNSLDPPLLTRYLRIHPQSWVHQIALRMEVLGCEAQDLY

SEQ ID NO: 32 - protein, 1386 aa, Artificial sequence
  amino acid sequence of a Factor VIII deletion variant
ATRRYYLGAVELSWDYMQSDLGELPVDARFPPRVPKSFPFNTSVVYKKTLFVEFTDHLFNIAKPRPPWMGLLGPTIQAEVYDTVVITLKNMASHPVSLHAVGVSYWKASEGAEYDDQTSQREKEDDKVFPGGSHTYVWQVLKENGPMASDPLCLTYSYLSHVDLVKDLNSGLIGALLVCREGSLAKEKTQTLHKFILLFAVFDEGKSWHSETKNSLMQDRDAASARAWPKMHTVNGYVNRSLPGLIGCHRKSVYWHVIGMGTTPEVHSIFLEGHTFLVRNHRQASLEISPITFLTAQTLLMDLGQFLLFCHISSHQHDGMEAYVKVDSCPEEPQLRMKNNEEAEDYDDDLTDSEMDVVRFDDDNSPSFIQIRSVAKKHPKTWVHYIAAEEEDWDYAPLVLAPDDRSYKSQYLNNGPQRIGRKYKKVRFMAYTDETFKTREAIQHESGILGPLLYGEVGDTLLIIFKNQASRPYNIYPHGITDVRPLYSRRLPKGVKHLKDFPILPGEIFKYKWTVTVEDGPTKSDPRCLTRYYSSFVNMERDLASGLIGPLLICYKESVDQRGNQIMSDKRNVILFSVFDENRSWYLTENIQRFLPNPAGVQLEDPEFQASNIMHSINGYVFDSLQLSVCLHEVAYWYILSIGAQTDFLSVFFSGYTFKHKMVYEDTLTLFPFSGETVFMSMENPGLWILGCHNSDFRNRGMTALLKVSSCDKNTGDYYEDSYEDISAYLLVEMKKEDFDIYRSFQKKTRHYFIAAVERLWDYGMSSSPHVLRNRAQSGSVPQFKKVVFQEFTDGSFTQPLYRGELNEHLGLLGPYIRAEVEDNIMVTFRNQASRPYSFYSSLISYEEDQRQGAEPRKNFVKPNETKTYFWKVQHHMAPTKDEFDCKAWAYFSDVDLEKDVHSGLIGPLLVCHTNTLNPAHGRQVTVQEFALFFTIFDETKSWYFTENMERNCRAPCNIQMEDPTFKENYRFHAINGYIMDTLPGLVMAQDQRIRWYLLSMGSNENIHSIHFSGHVFTVRKKEEYKMALYNLYPGVFETVEMLPSKAGIWRVECLIGEHLHAGMSTLFLVYSNKCQTPLGMASGHIRDFQITASGQYGQWAPKLARLHYSGSINAWSTKEPFSWIKVDLLAPMIIHGIKTQGARQKFSSLYISQFIIMYSLDGKKWQTYRGNSTGTLMVFFGNVDSSGIKHNIFNPPIIARYIRLHPTHYSIRSTLRMELMGCDLNSCSMPLGMESKAISDAQITASSYFTNMFATWSPSKARLHLQGRSNAWRPQVNNPKEWLQVDFQKTMKVTGVTTQGVKSLLTSMYVKEFLISSSQDGHQWTLFFQNGKVKVFQGNQDSFTPVVNSLDPPLLTRYLRIHPQSWVHQIALRMEVLGCEAQDLY

SEQ ID NO: 33 - protein, 1385 aa, Artificial sequence
  amino acid sequence of a Factor VIII deletion variant
ATRRYYLGAVELSWDYMQSDLGELPVDARFPPRVPKSFPFNTSVVYKKTLFVEFTDHLFNIAKPRPPWMGLLGPTIQAEVYDTVVITLKNMASHPVSLHAVGVSYWKASEGAEYDDQTSQREKEDDKVFPGGSHTYVWQVLKENGPMASDPLCLTYSYLSHVDLVKDLNSGLIGALLVCREGSLAKEKTQTLHKFILLFAVFDEGKSWHSETKNSLMQDRDAASARAWPKMHTVNGYVNRSLPGLIGCHRKSVYWHVIGMGTTPEVHSIFLEGHTFLVRNHRQASLEISPITFLTAQTLLMDLGQFLLFCHISSHQHDGMEAYVKVDSCPEEPQLRMKNNEEAEDYDDDLTDSEMDVVRFDDDNSPSFIQIRSVAKKHPKTWVHYIAAEEEDWDYAPLVLAPDDRSYKSQYLNNGPQRIGRKYKKVRFMAYTDETFKTREAIQHESGILGPLLYGEVGDTLLIIFKNQASRPYNIYPHGITDVRPLYSRRLPKGVKHLKDFPILPGEIFKYKWTVTVEDGPTKSDPRCLTRYYSSFVNMERDLASGLIGPLLICYKESVDQRGNQIMSDKRNVILFSVFDENRSWYLTENIQRFLPNPAGVQLEDPEFQASNIMHSINGYVFDSLQLSVCLHEVAYWYILSIGAQTDFLSVFFSGYTFKHKMVYEDTLTLFPFSGETVFMSMENPGLWILGCHNSDFRNRGMTALLKVSSCDKNTGDYYEDSVEMKKEDFDIYDEDENQSPRSFQKKTRHYFIAAVERLWDYGMSSSPHVLRNRAQSGSVPQFKKVVFQEFTDGSFTQPLYRGELNEHLGLLGPYIRAEVEDNIMVTFRNQASRPYSFYSSLISYEEDQRQGAEPRKNFVKPNETKTYFWKVQHHMAPTKDEFDCKAWAYFSDVDLEKDVHSGLIGPLLVCHTNTLNPAHGRQVTVQEFALFFTIFDETKSWYFTENMERNCRAPCNIQMEDPTFKENYRFHAINGYIMDTLPGLVMAQDQRIRWYLLSMGSNENIHSIHFSGHVFTVRKKEEYKMALYNLYPGVFETVEMLPSKAGIWRVECLIGEHLHAGMSTLFLVYSNKCQTPLGMASGHIRDFQITASGQYGQWAPKLARLHYSGSINAWSTKEPFSWIKVDLLAPMIIHGIKTQGARQKFSSLYISQFIIMYSLDGKKWQTYRGNSTGTLMVFFGNVDSSGIKHNIFNPPIIARYIRLHPTHYSIRSTLRMELMGCDLNSCSMPLGMESKAISDAQITASSYFTNMFATWSPSKARLHLQGRSNAWRPQVNNPKEWLQVDFQKTMKVTGVTTQGVKSLLTSMYVKEFLISSSQDGHQWTLFFQNGKVKVFQGNQDSFTPVVNSLDPPLLTRYLRIHPQSWVHQIALRMEVLGCEAQDLY

SEQ ID NO: 34 - protein, 1377 aa, Artificial sequence
  amino acid sequence of a Factor VIII deletion variant
ATRRYYLGAVELSWDYMQSDLGELPVDARFPPRVPKSFPFNTSVVYKKTLFVEFTDHLFNIAKPRPPWMGLLGPTIQAEVYDTVVITLKNMASHPVSLHAVGVSYWKASEGAEYDDQTSQREKEDDKVFPGGSHTYVWQVLKENGPMASDPLCLTYSYLSHVDLVKDLNSGLIGALLVCREGSLAKEKTQTLHKFILLFAVFDEGKSWHSETKNSLMQDRDAASARAWPKMHTVNGYVNRSLPGLIGCHRKSVYWHVIGMGTTPEVHSIFLEGHTFLVRNHRQASLEISPITFLTAQTLLMDLGQFLLFCHISSHQHDGMEAYVKVDSCPEEPQLRMKNNEEAEDYDDDLTDSEMDVVRFDDDNSPSFIQIRSVAKKHPKTWVHYIAAEEEDWDYAPLVLAPDDRSYKSQYLNNGPQRIGRKYKKVRFMAYTDETFKTREAIQHESGILGPLLYGEVGDTLLIIFKNQASRPYNIYPHGITDVRPLYSRRLPKGVKHLKDFPILPGEIFKYKWTVTVEDGPTKSDPRCLTRYYSSFVNMERDLASGLIGPLLICYKESVDQRGNQIMSDKRNVILFSVFDENRSWYLTENIQRFLPNPAGVQLEDPEFQASNIMHSINGYVFDSLQLSVCLHEVAYWYILSIGAQTDFLSVFFSGYTFKHKMVYEDTLTLFPFSGETVFMSMENPGLWILGCHNSDFRNRGMTALLKVSSCDKNTGDYYEDSVEMKKEDFDIYRSFQKKTRHYFIAAVERLWDYGMSSSPHVLRNRAQSGSVPQFKKVVFQEFTDGSFTQPLYRGELNEHLGLLGPYIRAEVEDNIMVTFRNQASRPYSFYSSLISYEEDQRQGAEPRKNFVKPNETKTYFWKVQHHMAPTKDEFDCKAWAYFSDVDLEKDVHSGLIGPLLVCHTNTLNPAHGRQVTVQEFALFFTIFDETKSWYFTENMERNCRAPCNIQMEDPTFKENYRFHAINGYIMDTLPGLVMAQDQRIRWYLLSMGSNENIHSIHFSGHVFTVRKKEEYKMALYNLYPGVFETVEMLPSKAGIWRVECLIGEHLHAGMSTLFLVYSNKCQTPLGMASGHIRDFQITASGQYGQWAPKLARLHYSGSINAWSTKEPFSWIKVDLLAPMIIHGIKTQGARQKFSSLYISQFIIMYSLDGKKWQTYRGNSTGTLMVFFGNVDSSGIKHNIFNPPIIARYIRLHPTHYSIRSTLRMELMGCDLNSCSMPLGMESKAISDAQITASSYFTNMFATWSPSKARLHLQGRSNAWRPQVNNPKEWLQVDFQKTMKVTGVTTQGVKSLLTSMYVKEFLISSSQDGHQWTLFFQNGKVKVFQGNQDSFTPVVNSLDPPLLTRYLRIHPQSWVHQIALRMEVLGCEAQDLY

SEQ ID NO: 35 - protein, 1391 aa, Artificial sequence
  amino acid sequence of a Factor VIII deletion variant
ATRRYYLGAVELSWDYMQSDLGELPVDARFPPRVPKSFPFNTSVVYKKTLFVEFTDHLFNIAKPRPPWMGLLGPTIQAEVYDTVVITLKNMASHPVSLHAVGVSYWKASEGAEYDDQTSQREKEDDKVFPGGSHTYVWQVLKENGPMASDPLCLTYSYLSHVDLVKDLNSGLIGALLVCREGSLAKEKTQTLHKFILLFAVFDEGKSWHSETKNSLMQDRDAASARAWPKMHTVNGYVNRSLPGLIGCHRKSVYWHVIGMGTTPEVHSIFLEGHTFLVRNHRQASLEISPITFLTAQTLLMDLGQFLLFCHISSHQHDGMEAYVKVDSCPEEPQLRMKNNEEAEDYDDDLTDSEMDVVRFDDDNSPSFIQIRSVAKKHPKTWVHYIAAEEEDWDYAPLVLAPDDRSYKSQYLNNGPQRIGRKYKKVRFMAYTDETFKTREAIQHESGILGPLLYGEVGDTLLIIFKNQASRPYNIYPHGITDVRPLYSRRLPKGVKHLKDFPILPGEIFKYKWTVTVEDGPTKSDPRCLTRYYSSFVNMERDLASGLIGPLLICYKESVDQRGNQIMSDKRNVILFSVFDENRSWYLTENIQRFLPNPAGVQLEDPEFQASNIMHSINGYVFDSLQLSVCLHEVAYWYILSIGAQTDFLSVFFSGYTFKHKMVYEDTLTLFPFSGETVFMSMENPGLWILGCHNSDFRNRGMTALLKVSSCDKNTGDYYEDSYEDISAVEMKKEDFDIYDEDENQSPRSFQKKTRHYFIAAVERLWDYGMSSSPHVLRNRAQSGSVPQFKKVVFQEFTDGSFTQPLYRGELNEHLGLLGPYIRAEVEDNIMVTFRNQASRPYSFYSSLISYEEDQRQGAEPRKNFVKPNETKTYFWKVQHHMAPTKDEFDCKAWAYFSDVDLEKDVHSGLIGPLLVCHTNTLNPAHGRQVTVQEFALFFTIFDETKSWYFTENMERNCRAPCNIQMEDPTFKENYRFHAINGYIMDTLPGLVMAQDQRIRWYLLSMGSNENIHSIHFSGHVFTVRKKEEYKMALYNLYPGVFETVEMLPSKAGIWRVECLIGEHLHAGMSTLFLVYSNKCQTPLGMASGHIRDFQITASGQYGQWAPKLARLHYSGSINAWSTKEPFSWIKVDLLAPMIIHGIKTQGARQKFSSLYISQFIIMYSLDGKKWQTYRGNSTGTLMVFFGNVDSSGIKHNIFNPPIIARYIRLHPTHYSIRSTLRMELMGCDLNSCSMPLGMESKAISDAQITASSYFTNMFATWSPSKARLHLQGRSNAWRPQVNNPKEWLQVDFQKTMKVTGVTTQGVKSLLTSMYVKEFLISSSQDGHQWTLFFQNGKVKVFQGNQDSFTPVVNSLDPPLLTRYLRIHPQSWVHQIALRMEVLGCEAQDLY

SEQ ID NO: 36 - protein, 1394 aa, Artificial sequence
  amino acid sequence of a Factor VIII deletion variant
ATRRYYLGAVELSWDYMQSDLGELPVDARFPPRVPKSFPFNTSVVYKKTLFVEFTDHLFNIAKPRPPWMGLLGPTIQAEVYDTVVITLKNMASHPVSLHAVGVSYWKASEGAEYDDQTSQREKEDDKVFPGGSHTYVWQVLKENGPMASDPLCLTYSYLSHVDLVKDLNSGLIGALLVCREGSLAKEKTQTLHKFILLFAVFDEGKSWHSETKNSLMQDRDAASARAWPKMHTVNGYVNRSLPGLIGCHRKSVYWHVIGMGTTPEVHSIFLEGHTFLVRNHRQASLEISPITFLTAQTLLMDLGQFLLFCHISSHQHDGMEAYVKVDSCPEEPQLRMKNNEEAEDYDDDLTDSEMDVVRFDDDNSPSFIQIRSVAKKHPKTWVHYIAAEEEDWDYAPLVLAPDDRSYKSQYLNNGPQRIGRKYKKVRFMAYTDETFKTREAIQHESGILGPLLYGEVGDTLLIIFKNQASRPYNIYPHGITDVRPLYSRRLPKGVKHLKDFPILPGEIFKYKWTVTVEDGPTKSDPRCLTRYYSSFVNMERDLASGLIGPLLICYKESVDQRGNQIMSDKRNVILFSVFDENRSWYLTENIQRFLPNPAGVQLEDPEFQASNIMHSINGYVFDSLQLSVCLHEVAYWYILSIGAQTDFLSVFFSGYTFKHKMVYEDTLTLFPFSGETVFMSMENPGLWILGCHNSDFRNRGMTALLKVSSCDKNTGDYYEDSYEDISATISVEMKKEDFDIYDEDENQSPRSFQKKTRHYFIAAVERLWDYGMSSSPHVLRNRAQSGSVPQFKKVVFQEFTDGSFTQPLYRGELNEHLGLLGPYIRAEVEDNIMVTFRNQASRPYSFYSSLISYEEDQRQGAEPRKNFVKPNETKTYFWKVQHHMAPTKDEFDCKAWAYFSDVDLEKDVHSGLIGPLLVCHTNTLNPAHGRQVTVQEFALFFTIFDETKSWYFTENMERNCRAPCNIQMEDPTFKENYRFHAINGYIMDTLPGLVMAQDQRIRWYLLSMGSNENIHSIHFSGHVFTVRKKEEYKMALYNLYPGVFETVEMLPSKAGIWRVECLIGEHLHAGMSTLFLVYSNKCQTPLGMASGHIRDFQITASGQYGQWAPKLARLHYSGSINAWSTKEPFSWIKVDLLAPMIIHGIKTQGARQKFSSLYISQFIIMYSLDGKKWQTYRGNSTGTLMVFFGNVDSSGIKHNIFNPPIIARYIRLHPTHYSIRSTLRMELMGCDLNSCSMPLGMESKAISDAQITASSYFTNMFATWSPSKARLHLQGRSNAWRPQVNNPKEWLQVDFQKTMKVTGVTTQGVKSLLTSMYVKEFLISSSQDGHQWTLFFQNGKVKVFQGNQDSFTPVVNSLDPPLLTRYLRIHPQSWVHQIALRMEVLGCEAQDLY

SEQ ID NO: 37 - DNA, 4371 bp, Artificial sequence
  codon optimised nucleotide sequence of a Factor VIII variant
atgcagattgagctgagcacctgcttcttcctgtgcctgctgaggttctgcttctctgccaccaggagatactacctgggggctgtggagctgagctgggactacatgcagtctgacctgggggagctgcctgtggatgccaggttcccccccagagtgcccaagagcttccccttcaacacctctgtggtgtacaagaagaccctgtttgtggagttcactgaccacctgttcaacattgccaagcccaggcccccctggatgggcctgctgggccccaccatccaggctgaggtgtatgacactgtggtgatcaccctgaagaacatggccagccaccctgtgagcctgcatgctgtgggggtgagctactggaaggcctctgagggggctgagtatgatgaccagaccagccagagggagaaggaggatgacaaggtgttccctgggggcagccacacctatgtgtggcaggtgctgaaggagaatggccccatggcctctgaccccctgtgcctgacctacagctacctgagccatgtggacctggtgaaggacctgaactctggcctgattggggccctgctggtgtgcagggagggcagcctggccaaggagaagacccagaccctgcacaagttcatcctgctgtttgctgtgtttgatgagggcaagagctggcactctgaaaccaagaacagcctgatgcaggacagggatgctgcctctgccagggcctggcccaagatgcacactgtgaatggctatgtgaacaggagcctgcctggcctgattggctgccacaggaagtctgtgtactggcatgtgattggcatgggcaccacccctgaggtgcacagcatcttcctggagggccacaccttcctggtcaggaaccacaggcaggccagcctggagatcagccccatcaccttcctgactgcccagaccctgctgatggacctgggccagttcctgctgttctgccacatcagcagccaccagcatgatggcatggaggcctatgtgaaggtggacagctgccctgaggagccccagctgaggatgaagaacaatgaggaggctgaggactatgatgatgacctgactgactctgagatggatgtggtgaggtttgatgatgacaacagccccagcttcatccagatcaggtctgtggccaagaagcaccccaagacctgggtgcactacattgctgctgaggaggaggactgggactatgcccccctggtgctggcccctgatgacaggagctacaagagccagtacctgaacaatggcccccagaggattggcaggaagtacaagaaggtcaggttcatggcctacactgatgaaaccttcaagaccagggaggccatccagcatgagtctggcatcctgggccccctgctgtatggggaggtgggggacaccctgctgatcatcttcaagaaccaggccagcaggccctacaacatctacccccatggcatcactgatgtgaggcccctgtacagcaggaggctgcccaagggggtgaagcacctgaaggacttccccatcctgcctggggagatcttcaagtacaagtggactgtgactgtggaggatggccccaccaagtctgaccccaggtgcctgaccagatactacagcagctttgtgaacatggagagggacctggcctctggcctgattggccccctgctgatctgctacaaggagtctgtggaccagaggggcaaccagatcatgtctgacaagaggaatgtgatcctgttctctgtgtttgatgagaacaggagctggtacctgactgagaacatccagaggttcctgcccaaccctgctggggtgcagctggaggaccctgagttccaggccagcaacatcatgcacagcatcaatggctatgtgtttgacagcctgcagctgtctgtgtgcctgcatgaggtggcctactggtacatcctgagcattggggcccagactgacttcctgtctgtgttcttctctggctacaccttcaagcacaagatggtgtatgaggacaccctgaccctgttccccttctctggggagactgtgttcatgagcatggagaaccctggcctgtggattctgggctgccacaactctgacttcaggaacaggggcatgactgccctgctgaaagtctccagctgtgacaagaacactggggactactatgaggacagctatgaggacatctctgcctacctgctgagcaagaacaatgccattgagcccaggagcttcagccagaaccccccagtgctgaagaggcaccagagggagatcaccaggaccaccctgcagtctgaccaggaggagattgactatgatgacaccatctctgtggagatgaagaaggaggactttgacatctacgacgaggacgagaaccagagccccaggagcttccagaagaagaccaggcactacttcattgctgctgtggagaggctgtgggactatggcatgagcagcagcccccatgtgctgaggaacagggcccagtctggctctgtgccccagttcaagaaggtggtgttccaggagttcactgatggcagcttcacccagcccctgtacagaggggagctgaatgagcacctgggcctgctgggcccctacatcagggctgaggtggaggacaacatcatggtgaccttcaggaaccaggccagcaggccctacagcttctacagcagcctgatcagctatgaggaggaccagaggcagggggctgagcccaggaagaactttgtgaagcccaatgaaaccaagacctacttctggaaggtgcagcaccacatggcccccaccaaggatgagtttgactgcaaggcctgggcctacttctctgatgtggacctggagaaggatgtgcactctggcctgattggccccctgctggtgtgccacaccaacaccctgaaccctgcccatggcaggcaggtgactgtgcaggagtttgccctgttcttcaccatctttgatgaaaccaagagctggtacttcactgagaacatggagaggaactgcagggccccctgcaacatccagatggaggaccccaccttcaaggagaactacaggttccatgccatcaatggctacatcatggacaccctgcctggcctggtgatggcccaggaccagaggatcaggtggtacctgctgagcatgggcagcaatgagaacatccacagcatccacttctctggccatgtgttcactgtgaggaagaaggaggagtacaagatggccctgtacaacctgtaccctggggtgtttgagactgtggagatgctgcccagcaaggctggcatctggagggtggagtgcctgattggggagcacctgcatgctggcatgagcaccctgttcctggtgtacagcaacaagtgccagacccccctgggcatggcctctggccacatcagggacttccagatcactgcctctggccagtatggccagtgggcccccaagctggccaggctgcactactctggcagcatcaatgcctggagcaccaaggagcccttcagctggatcaaggtggacctgctggcccccatgatcatccatggcatcaagacccagggggccaggcagaagttcagcagcctgtacatcagccagttcatcatcatgtacagcctggatggcaagaagtggcagacctacaggggcaacagcactggcaccctgatggtgttctttggcaatgtggacagctctggcatcaagcacaacatcttcaacccccccatcattgccagatacatcaggctgcaccccacccactacagcatcaggagcaccctgaggatggagctgatgggctgtgacctgaacagctgcagcatgcccctgggcatggagagcaaggccatctctgatgcccagatcactgccagcagctacttcaccaacatgtttgccacctggagccccagcaaggccaggctgcacctgcagggcaggagcaatgcctggaggccccaggtcaacaaccccaaggagtggctgcaggtggacttccagaagaccatgaaggtgactggggtgaccacccagggggtgaagagcctgctgaccagcatgtatgtgaaggagttcctgatcagcagcagccaggatggccaccagtggaccctgttcttccagaatggcaaggtgaaggtgttccagggcaaccaggacagcttcacccctgtggtgaacagcctggacccccccctgctgaccagatacctgaggattcacccccagagctgggtgcaccagattgccctgaggatggaggtgctgggctgtgaggcccaggacctgtac

SEQ ID NO: 38 - DNA, 4371 bp, Artificial sequence
  codon optimised nucleotide sequence of a Factor VIII variant
atgcagattgagctgagcacctgcttcttcctgtgtctgctgaggttctgcttctctgccaccaggaggtattacctgggggctgtggagctgagctgggactatatgcagtctgacctgggggagctgcctgtggatgctaggttcccccccagggtgcccaagagcttcccctttaacacttctgtggtgtacaagaagaccctgtttgtggagttcactgaccacctgttcaacattgccaagcccaggcccccctggatggggctgctggggcccaccatccaggctgaggtgtatgacactgtggtgatcaccctgaagaacatggccagccaccctgtgagcctgcatgctgtgggggtgagctactggaaggcttctgagggggctgagtatgatgaccagactagccagagggagaaggaggatgacaaggtgtttcctgggggcagccatacctatgtgtggcaggtgctgaaggagaatggccccatggcctctgaccccctgtgcctgacctacagctacctgtctcatgtggacctggtgaaggacctgaactctggcctgattggggctctgctggtgtgtagggagggcagcctggctaaggaaaagacccagaccctgcataagtttatcctgctgtttgctgtgtttgatgagggcaagagctggcactctgagaccaagaacagcctgatgcaggatagggatgctgcctctgccagggcttggcctaagatgcacactgtgaatgggtatgtgaataggagcctgcctggcctgattggctgccacaggaagtctgtgtactggcatgtgattgggatgggcaccacccctgaggtccatagcatcttcctggagggccacactttcctggtgaggaaccacagacaggcctctctggagatctctcccatcaccttcctgactgctcagactctgctgatggacctgggccagttcctgctgttttgccatattagcagccaccagcatgatgggatggaggcctatgtgaaggtggatagctgccctgaggagcctcagctgaggatgaagaacaatgaggaggctgaagactatgatgatgacctgactgattctgagatggatgtggtgaggtttgatgatgacaatagccccagcttcattcagatcaggtctgtggccaagaaacaccccaagacctgggtgcactacattgctgctgaggaagaggactgggactatgctcccctggtgctggcccctgatgataggtcttataagagccagtacctgaacaatgggccccagaggattggcaggaagtacaagaaggtgaggttcatggcctacactgatgaaaccttcaaaaccagggaggccattcagcatgagtctggcatcctgggccctctgctgtatggggaggtgggggacaccctgctgatcatcttcaagaaccaggccagcaggccctacaacatctatcctcatggcatcactgatgtgaggcccctgtacagcaggaggctgcccaagggggtgaagcacctgaaagacttccccatcctgcctggggagatctttaagtataagtggactgtgactgtggaggatggccctaccaagtctgaccccaggtgtctgaccaggtactattctagctttgtgaacatggagagggacctggcctctggcctgattgggcccctgctgatctgctacaaggagtctgtggaccagaggggcaaccagatcatgtctgacaagaggaatgtgatcctgttttctgtgtttgatgagaataggagctggtacctgactgagaacatccagaggtttctgcccaatcctgctggggtgcagctggaggatcctgagttccaggccagcaatatcatgcatagcatcaatggctatgtgtttgacagcctgcagctgtctgtgtgcctgcatgaggtggcctactggtacatcctgagcattggggcccagactgactttctgtctgtgttcttttctggctataccttcaagcacaagatggtgtatgaggataccctgaccctgttccccttctctggggagactgtgttcatgagcatggagaatcctgggctgtggatcctggggtgccacaactctgattttaggaacagggggatgactgccctgctgaaggtgtctagctgtgataagaacactggggactactatgaggacagctatgaggacatttctgcttatctgctgtctaagaataatgccattgagcccagaagcttcagccagaatccccctgtgctgaagagacatcagagggagatcaccagaactaccctgcagtctgatcaggaggagattgactatgatgacactatctctgtggagatgaagaaggaggactttgacatctatgatgaggatgagaatcagtctcccaggagctttcagaagaagaccagacattacttcattgctgctgtggagaggctgtgggactatggcatgagctctagccctcatgtgctgaggaacagggcccagtctggctctgtgccccagttcaagaaggtggtgttccaggaattcactgatggcagcttcacccagcccctgtacaggggggagctgaatgagcacctgggcctgctggggccttatatcagggctgaggtggaggataatattatggtgactttcaggaaccaggccagcaggccctactctttctatagcagcctgatctcttatgaggaggatcagaggcagggggctgagcctaggaagaactttgtgaagcccaatgagactaagacctacttctggaaggtccagcaccacatggcccctaccaaggatgagtttgactgcaaggcctgggcctatttctctgatgtggatctggagaaggatgtccattctgggctgattggccccctgctggtgtgccacactaacactctgaatcctgcccatggcaggcaggtgactgtccaggagtttgccctgttcttcactatctttgatgagaccaagagctggtactttactgagaacatggagaggaactgcagagctccttgcaatattcagatggaggaccccaccttcaaggagaattacaggttccatgccattaatgggtacatcatggacaccctgcctggcctggtgatggctcaggaccagaggatcaggtggtacctgctgagcatgggctctaatgagaatatccacagcatccacttctctgggcatgtgttcactgtgaggaagaaggaggagtacaagatggctctgtataatctgtaccctggggtgtttgaaactgtggagatgctgccctctaaggctggcatctggagggtggagtgcctgattggggagcacctgcatgctggcatgagcaccctgttcctggtgtacagcaacaagtgccagacccccctgggcatggcctctggccacatcagggacttccagatcactgcctctggccagtatggccagtgggcccccaagctggccaggctgcactattctggcagcatcaatgcctggagcaccaaggagcccttcagctggatcaaggtggacctgctggcccccatgatcattcatggcatcaagacccagggggccaggcagaagttcagctctctgtacatctctcagttcatcatcatgtactctctggatgggaagaagtggcagacctacaggggcaacagcactggcaccctgatggtgttctttgggaatgtggactcttctggcatcaagcacaacatcttcaatccccccatcattgctaggtatattaggctgcatcccacccactacagcatcaggtctaccctgaggatggagctgatgggctgtgacctgaactcttgcagcatgcccctgggcatggagtctaaggccatctctgatgcccagattactgccagcagctacttcaccaacatgtttgccacctggagcccctctaaggccaggctgcatctgcaggggaggagcaatgcctggaggcctcaggtgaacaaccccaaggagtggctgcaggtggatttccagaagaccatgaaggtgactggggtgaccacccagggggtcaagagcctgctgaccagcatgtatgtgaaggagttcctgatcagcagcagccaggatggccaccagtggactctgttctttcagaatgggaaggtgaaggtgtttcagggcaatcaggactctttcacccctgtggtgaacagcctggacccccccctgctgaccagatacctgaggatccacccccagtcttgggtgcatcagattgccctgaggatggaggtgctgggctgtgaggctcaggatctgtac

SEQ ID NO: 39 - DNA, 4182 bp, Artificial sequence
  codon optimised sequence of a Factor VIII deletion variant
gctactagaagatattatcttggggcagtggagctgagctgggactacatgcagtctgacctgggagaactgcctgtggatgccagatttccccctcgagtgcccaagagcttcccctttaacacctcagtggtgtacaagaagaccctgtttgtggagtttacagaccatctcttcaacattgctaagcccagacctccctggatgggcctgctgggccctaccatccaagctgaagtgtatgacactgttgtgatcacactcaagaacatggcctcccatcctgtgtccctgcatgcagtgggagtctcctactggaaggcctcagaaggagcagagtatgatgaccagaccagccagagagagaaggaggatgacaaggtgtttcctggagggagccacacctatgtgtggcaggtgctgaaggagaatggacctatggccagtgaccctctgtgtcttacctattcctacctgtcacatgtggatctggtgaaggacctgaacagtggcctgattggggctctgctggtttgcagagaaggcagcttggccaaggagaagacccaaaccctgcacaagttcatcctgctgtttgctgtgtttgatgaggggaaatcatggcactcagagaccaagaacagcctcatgcaggatagggatgctgccagtgccagggcttggcccaagatgcacactgtgaatggctatgtgaatagaagcctgcctgggctgataggctgtcacagaaaatctgtgtactggcatgtgattggcatgggcaccacacctgaggtgcactccattttcctggagggccacaccttccttgtgagaaaccacagacaagcttccctggagatcagcccaatcacctttctgactgctcaaaccctcctgatggatctgggccagttcctgctgttctgtcatatctcctcacaccagcatgatggaatggaagcttatgtcaaggtggactcctgcccagaggaaccacagctcagaatgaagaacaatgaggaggctgaggactatgatgatgacctgacagactctgaaatggatgtggtcagatttgatgatgacaacagcccttcattcatccaaatcagatctgtggccaagaagcatcccaagacctgggtgcactacatagctgctgaggaggaggactgggactatgcccctctggtcctggcccctgatgacagaagctataaaagccagtacctgaataatggcccccagagaattggcagaaagtacaagaaagtcagattcatggcttacactgatgagaccttcaaaaccagggaagccatccagcatgagtcaggcatcctgggccccctgctgtatggggaggttggagataccctgctgattatcttcaaaaaccaggcaagcaggccctacaatatctaccctcatggcatcactgatgtcaggccactgtattccagaagactgcctaagggggtgaagcacctgaaggacttcccaatcctgccaggggagattttcaaatacaagtggacagtgactgtggaggatggaccaaccaagtcagatcctagatgtctgaccagatactactccagctttgtgaacatggagagagacctggcctctggcctgattggccctctgctgatctgctataaagagtcagtggaccagagaggcaaccagatcatgagtgacaaaagaaatgtgatcttgttctcagtgtttgatgagaatagatcttggtacctcacagaaaacatccagaggttcctgcccaatccagctggggtgcagctggaagatccagaattccaggccagcaacatcatgcatagcatcaatggttatgtctttgacagcctgcagctgtcagtgtgtctgcatgaagttgcttactggtatattctgtccattggagcccagacagacttcctgtctgtcttcttctctggctacacctttaaacacaagatggtgtatgaggacaccctgaccctgttccctttctctggggaaacagtgttcatgtccatggaaaaccctggactgtggatcctgggctgccataacagtgacttcagaaacagaggcatgacagccctgctcaaggtgtccagctgtgataagaacacaggagactactatgaggatagctatgaggacatcagtgcttacctgctggtggaaatgaaaaaggaggattttgacatctatgatgaggatgagaaccagagccctagaagcttccagaaaaagactagacactacttcattgctgcagtggagagactctgggattatggcatgagctccagcccccatgtgctgagaaatagagctcagagtggcagtgtgccacagttcaagaaggtggtgtttcaggagttcactgatggctccttcacacaaccactttacagaggagaactgaatgagcacctgggcctcctgggcccctacatcagggctgaagtggaggataacattatggtcacatttaggaatcaggcttccagaccctactccttttattcctcactcatttcctatgaggaggaccagaggcagggagctgagcccagaaaaaattttgtgaaacccaatgaaaccaagacctacttctggaaggtgcagcaccatatggcccctaccaaggatgaatttgactgcaaggcttgggcttacttttctgatgtggaccttgagaaagatgtgcattcaggcctcattgggccactgctggtgtgccacaccaatacactgaaccctgctcatgggagacaggtcacagtgcaggagtttgcactcttctttaccatctttgatgagaccaagtcctggtatttcactgagaacatggagaggaactgcagggccccttgtaacatccagatggaggatcccaccttcaaggaaaactacagattccatgccatcaatggctacatcatggacaccctgccaggcctggtgatggcccaggaccagaggatcaggtggtacctcctgtctatgggcagcaatgaaaatatccacagcattcacttctctggacatgtgtttactgtgaggaagaaggaggaatacaagatggctctgtacaacctctaccctggggtgtttgaaacagtggagatgctgccctccaaggctggcatctggagagtggaatgtctgattggggagcatctgcatgctggcatgagcacactgttcctggtgtattccaacaagtgccagaccccactgggcatggcctcaggacatatcagggacttccagatcactgctagtggacaatatggacagtgggcacccaagctggccagactgcactactcaggctccatcaatgcctggagtaccaaggagcccttcagctggatcaaggtggacctgctggcccccatgattatacatggcatcaagacccagggagctagacagaagttcagctccctgtacatctcccaattcatcatcatgtactctctggatggcaagaaatggcagacctacagaggcaatagcactggcaccctgatggtgttttttggaaatgttgactcttctggcatcaagcacaacatcttcaacccccccatcattgccagatatatcaggctccaccccacccactactccataaggagcaccctgagaatggagctgatgggctgtgacctgaattcctgctccatgcccctgggcatggaatccaaggcaatctctgatgcacagatcacagcctcctcctacttcaccaacatgtttgcaacctggagcccctccaaggccagactgcacctgcagggcaggtccaatgcttggagaccacaagtgaacaacccaaaggagtggctgcaggtggacttccagaagaccatgaaagtgactggagtgaccacccagggagtgaaatccctgctcactagcatgtatgtgaaggaattcctgatcagtagctctcaagatggccaccagtggaccctgttcttccagaatggcaaggtgaaggtgtttcagggcaaccaggattccttcacccctgtggtgaatagcctggatcccccactgctgaccagatacctgagaatccacccccagtcctgggttcaccagattgccctgagaatggaggtgctgggctgtgaggcccaggacctgtac

SEQ ID NO: 40 - DNA, 4182 bp, Artificial sequence
  codon optimised sequence of a Factor VIII deletion variant
gccaccagacgatattacctgggagctgtggaactgagctgggactacatgcagtctgacctgggagagctgcctgtggatgctagatttcctcctcgagtgcccaagagcttccccttcaacaccagtgtggtttacaagaaaaccctgtttgtggaattcacagaccacctgttcaatattgccaagcctagacctccctggatgggactgttgggacctacaattcaggctgaggtgtatgacacagtggtcatcaccctgaagaacatggccagccatcctgtgtctctgcatgctgtgggagtgtcttactggaaggcttctgagggagctgagtatgatgatcagacaagccagagagagaaagaggatgacaaggttttccctggaggcagccacacctatgtctggcaagtgctgaaagaaaatggccctatggccagtgatcctctgtgcctgacatacagctacctgagccatgtggacctggtcaaggacctgaattctggcctgattggagccctgcttgtgtgtagagaaggcagcctggccaaagagaaaacccagacactgcacaagttcatcctgctctttgctgtgtttgatgagggcaagagctggcacagtgagacaaagaacagcctgatgcaggacagggatgctgcctctgcacgagcttggcctaagatgcacacagtgaatggctatgtgaacagaagcctgcctggactgattggctgccacagaaagagtgtgtactggcatgtgattggcatgggcacaacacctgaggtgcacagcatctttctggaaggacacaccttccttgtgagaaaccatagacaggccagcctggaaatcagccctatcaccttcctgactgcacagaccctgctgatggatctgggccagtttctgcttttctgccacatcagcagccaccagcatgatggcatggaagcctatgtgaaggtggacagctgccctgaagagccccagctgagaatgaagaacaatgaggaagctgaggactatgatgatgacctgacagactctgagatggatgtggtcagatttgatgatgacaacagccccagcttcatccaaatcagaagtgtggccaagaaacaccccaagacctgggtgcactatattgctgcggaggaagaggactgggattatgctcctctggtgctggcccctgatgacagaagctacaagagccagtacctgaacaatggccctcagagaattggcagaaagtataagaaagtgagattcatggcctacacagatgagacattcaagaccagagaggccattcagcatgagagtggcattctgggccctctgctttatggagaagtgggagatacactgctgatcatattcaagaaccaggccagcagaccctacaacatctaccctcatggcatcacagatgtgagacccctgtattctagaaggctgcccaagggagtgaagcacctgaaggacttccctatcctgcctggagagatcttcaagtacaagtggacagtgacagtggaagatggccccaccaagagtgaccctagatgtctgacaagatactacagctcctttgtgaacatggaaagagacctggccagtggcctgattggacctctgctgatctgctacaaagaaagtgtggaccagagaggcaaccagatcatgagtgacaagagaaatgtgatcctgtttagtgtgtttgatgagaacagatcctggtatctgacagagaacatccagagatttctgcccaatcctgctggagtgcagctggaagatcctgagttccaggcctccaacatcatgcactccatcaatggctatgtgtttgacagcctgcagctgagtgtgtgcctgcatgaagtggcctattggtatatcctgagcattggagcccagacagacttcctgagtgtgttctttagtggctacaccttcaagcacaagatggtgtatgaggataccctgacactgttcccattctccggagagacagtgttcatgtccatggaaaaccctggcctgtggatcctgggctgtcacaacagtgacttcagaaacagaggcatgacagccctgcttaaggtgtccagctgtgacaagaacacaggagactactatgaggacagctatgaggacatcagtgcctacctgcttgtggagatgaagaaagaagattttgacatctatgatgaggatgagaatcagagccccagaagctttcagaaaaagaccagacactacttcattgctgcagtggagagactgtgggactatggcatgtctagcagccctcatgtgctgagaaatagagcccagagtggcagtgtgccccagttcaagaaagtggttttccaagagttcacagatggcagcttcacccagccactgtatagaggagagctgaatgagcatctgggcctgcttggcccttatatccgggctgaagtggaagataacatcatggtcaccttcagaaatcaggcctctagaccctacagcttctacagctccctgatcagctatgaagaggaccagagacagggagctgagcccagaaagaactttgtgaagcccaatgagactaagacctacttttggaaggtgcagcaccacatggcccctacaaaggatgagtttgactgcaaggcctgggcctactttagtgatgtggatctggaaaaggatgtgcacagtgggctcattggaccactgcttgtgtgccacaccaacacactgaaccctgctcatggcagacaagtgacagtgcaagagtttgccctgttcttcaccatctttgatgaaacaaagagctggtacttcacagagaatatggaaagaaactgcagagccccttgcaacatccagatggaagatcccaccttcaaagagaactacagattccatgccatcaatggctacatcatggacacactgcctggcctggttatggctcaggatcagagaatcagatggtatctgctgtctatgggctccaatgagaatatccacagcatccacttcagtggccatgtgttcacagtgagaaaaaaggaagagtacaaaatggccctgtacaatctgtaccctggggtgtttgaaacagtggaaatgctgccttccaaggctggcatttggagagtggaatgtctgattggagagcacctccatgctggaatgagcaccctgtttctggtgtacagcaacaagtgtcagacccctcttggcatggcctctggacacatcagagacttccagatcacagcctctggccagtatggacagtgggctcctaaactggctagactgcactacagtggcagcatcaatgcctggtccaccaaagagcccttcagctggatcaaggtggacctgcttgctcccatgatcatacatggaatcaagacccagggagccagacagaagttcagcagtctgtacatcagccagttcatcattatgtacagcctggatggcaagaaatggcagacctacagaggcaacagcacaggcacactcatggtgttctttggcaatgtggactccagtggcattaagcacaacatcttcaaccctcctatcattgccagatacatcagactgcaccccacacactacagcatcagatctaccctgagaatggaactgatgggctgtgacctgaacagctgcagcatgccccttggaatggaaagcaaggccatcagtgatgcccagatcacagccagctcctacttcaccaacatgtttgccacttggagcccctccaaggctagactgcatctgcagggcagaagcaatgcttggaggccccaagtgaacaaccccaaagagtggctgcaggtggactttcaaaagaccatgaaagtgacaggagtgaccacacagggagtcaagtctcttctgaccagcatgtatgtgaaagagttcctgatctccagtagccaggatggccatcagtggaccctgtttttccaaaatggcaaagtgaaagtgttccagggcaatcaggacagcttcacacctgtggtcaactccctggatcctcctctgcttacccggtacctgagaattcaccctcagtcttgggtgcaccagattgctctgagaatggaagtgctgggctgtgaagctcaggacctctac

SEQ ID NO: 41 - DNA, 4182 bp, Artificial sequence
  codon optimised sequence of a Factor VIII deletion variant
gctacaaggcgttactatctgggagctgtggagctgtcttgggattacatgcagtcagacctgggagagctgccagtggatgccagatttccccctcgagtgcccaagagcttcccttttaatacctctgtggtgtataagaaaaccctgtttgtggagtttaccgatcacctgttcaacattgctaagccaaggccaccctggatgggcctgctgggaccaacaatccaggctgaggtgtatgatacagtggtcatcaccctgaagaacatggcttcccaccctgtgtcactgcatgctgtgggagtgagctactggaaggccagtgagggagctgagtatgatgatcagaccagccagagagagaaggaggatgacaaggtgtttcctggaggctctcatacctatgtgtggcaggtgctgaaggagaatggcccaatggctagtgatcccctgtgcctgacctacagctatctgtctcatgtggacctggtgaaggatctgaacagtggcctgattggagccctgcttgtgtgtcgtgaaggctctctggccaaggaaaagacccagacactgcataagttcatcctgctttttgctgtgtttgatgagggcaagtcctggcacagtgagacaaagaactccctgatgcaggacagggatgctgccagtgccagggcctggcccaagatgcatacagtgaatggctatgtgaataggtccctgcctggcctgattggatgtcacagaaagagtgtgtattggcatgtgattggcatgggcaccacacctgaggttcactccatcttcctggagggccatacctttcttgtgagaaaccacaggcaggccagtctggagatcagtcctatcaccttcctgacagcccagaccctgcttatggatctgggccagttcctgcttttttgccacatctccagtcaccagcatgatggcatggaggcttatgtgaaggtggactcctgtcctgaggaacctcagctgagaatgaagaacaatgaggaagctgaggactatgatgatgacctgacagactctgagatggatgtggttagatttgatgatgacaactctccttcctttattcaaatccgatcagtggccaagaaacacccaaagacatgggtgcattacattgctgcagaggaggaggactgggattatgctcctctggtgctggcccctgatgacaggtcctacaagtcccagtatctgaacaatggccctcagaggattggcagaaagtacaagaaagtgaggttcatggcttatacagatgagacattcaagacaagggaggccatccagcatgagagtggcatcctgggaccactgctttatggagaagtgggagacaccctgcttatcatttttaaaaaccaggcttccaggccctacaatatctatcctcatggcatcacggatgtgagacccctgtacagtaggagactgcctaagggagtgaagcacctgaaggacttcccaatcctgcctggagagattttcaagtataagtggacagtgacagtggaggatggcccaaccaagagtgaccccaggtgcctgacaagatactattcttcctttgtgaatatggagagggacctggcctctggcctgattggacctctgcttatctgttacaaggagtctgtggatcagagaggcaaccagatcatgagtgacaagaggaatgtgatcctgttcagtgtgtttgatgagaacaggtcttggtatctgacagagaacatccagagattcctgcccaatcctgctggagtgcaactggaggaccctgagtttcaggcctccaacatcatgcatagcatcaatggctatgtgtttgactccctccaactgagtgtgtgcctgcatgaggtggcttattggtacattctgagcattggagcccagacagatttcctgagtgtgttctttagtggctacaccttcaagcataagatggtgtatgaggacaccctgacactgttccccttttctggagagacagtgttcatgtccatggagaatcctggcctgtggattctgggctgccacaactctgatttccgtaatcgtggcatgacagcccttctgaaggtgtcttcctgtgacaagaacacaggagactactatgaggattcttatgaggacatcagtgcttatctgcttgtggagatgaaaaaggaggactttgacatctatgatgaggatgagaaccagagccccaggtctttccagaagaaaaccagacattactttattgctgcagtggagagactgtgggattatggcatgtccagctctccacatgtgctgagaaatagagcccagagtggcagtgtgccccagttcaagaaagtggttttccaggagtttacagatggatcatttacacagcctctgtacagaggagagctgaatgagcatctgggcctgcttggcccatatatcagagctgaggtggaggataacatcatggtgaccttccgtaatcaggccagcaggccctactccttttattcatccctgatctcctatgaggaagaccagagacagggagctgagccaagaaagaactttgtgaagcccaatgagacaaagacctacttttggaaggtgcagcaccatatggcccctaccaaggatgagtttgattgcaaggcttgggcttacttcagtgatgtggatctggagaaggatgtgcattctggcctgattggaccactgcttgtgtgccataccaacacactgaatcctgctcatggcagacaagtgacagtgcaggagtttgccctgttctttaccatctttgatgagacaaagagctggtacttcacagagaacatggagaggaattgcagggctccttgtaacatccagatggaggacccaaccttcaaggagaactacagatttcatgctatcaatggctatatcatggatacactgcctggcctggtcatggctcaggaccagaggatcaggtggtatctgcttagcatgggctccaatgagaatatccacagcatccatttctctggccatgtgtttaccgtgagaaaaaaggaggaatataagatggccctgtacaacctgtatcctggagtgtttgagacagtggagatgctgccatctaaggctggcatctggagggtggagtgcctgattggagagcacctgcatgctggcatgtctaccctgtttctggtgtactccaataagtgtcagacaccactgggcatggccagtggccatatcagagatttccagatcacagcctctggacagtatggacagtgggctccaaagctggctagactgcactattctggctccatcaatgcctggtccaccaaggagcccttctcctggatcaaggtggacctgcttgctcccatgatcattcatggcatcaagacacagggagccaggcagaagttctcttccctgtacatcagccagtttatcatcatgtattctctggatggcaagaaatggcagacctacagaggcaattctacaggcacactgatggtgttctttggcaatgtggacagctctggcatcaagcacaacatcttcaatccccctatcattgctagatacatcagactgcaccctacccattattctatccgatccacactgagaatggagctgatgggctgtgatctgaacagctgttctatgccactgggcatggagtccaaggccatcagtgatgctcagatcacagcctccagctacttcaccaatatgtttgctacatggtcccctagcaaggccaggctgcacctccagggcagatccaatgcttggagacctcaagttaacaatccaaaggagtggctccaggtggattttcagaaaaccatgaaggtgacaggagtgaccacccagggagtgaagtctctgcttaccagcatgtatgtgaaggagttcctgatctcttcgagtcaagatggacaccagtggacactgttctttcagaatggcaaggtgaaggtgttccagggcaatcaggattcctttaccccagtggtgaacagcctggacccaccactgcttacaagatacctgagaatccaccctcagtcctgggtgcatcagattgctctgaggatggaggtgctgggatgtgaggctcaggacctgtat

SEQ ID NO: 42 - DNA, 4182 bp, Artificial sequence
  codon optimised sequence of a Factor VIII deletion variant
gccaccagacgttactacctgggagctgtggagctgagctgggactacatgcagagtgacctgggagagctgcctgtggatgccagattcccccctcgagtgcccaagagcttccccttcaacaccagtgtggtgtacaaaaagaccctgtttgtggagttcacagaccacctgttcaacattgccaagcccagacccccttggatgggcctgcttggccccaccatccaagctgaggtgtatgacacagtggttatcaccctgaagaacatggccagccaccctgttagtctgcatgctgtgggagtgagctactggaaggccagtgaaggagctgagtatgatgaccagaccagccagagagagaaggaggatgacaaggtgttccctggaggcagccacacctatgtgtggcaggtgctgaaggagaatggccctatggccagtgaccccctgtgcctgacctacagctacctgagccatgtggacctggtgaaggacctgaacagtggcctgattggagccctgcttgtgtgcagagagggcagcctggccaaggagaagacccagaccctgcacaagttcatcctgttgtttgctgtgtttgatgagggcaagagctggcacagtgagaccaagaacagcctgatgcaggacagagatgctgccagtgccagagcctggcccaagatgcacacagtgaatggctatgtgaacagaagcctgcctggcctgattggctgccacagaaagagtgtgtactggcatgtgattggcatgggcaccacacctgaggtgcacagcatcttcctggagggccacaccttccttgttcgtaaccacagacaggccagcctggagatcagccccatcaccttcctgacagcccagaccctgcttatggacctgggccagttcctgcttttctgccacatcagcagtcaccagcatgatggcatggaggcctatgtgaaggtggacagctgccctgaggaaccccagctgagaatgaagaacaatgaggaagctgaggactatgacgatgacctgacagacagtgagatggatgtggttagatttgacgatgacaacagccccagcttcatccaaatcagaagtgtggccaagaagcaccccaagacctgggtgcactacattgcagctgaggaggaagactgggactatgcccccctggtgctggcccctgatgacagaagctacaagagccagtacctgaacaatggcccccagagaattggcagaaagtacaagaaagtgagattcatggcctacacagatgagaccttcaagaccagagaggccatccagcatgagagtggcatcctgggcccccttctgtatggagaggtgggagacacccttctgataatcttcaagaaccaggccagcagaccctacaacatctaccctcatggcatcacagatgtgagacccctgtacagcagaaggctgcccaagggagtgaagcacctgaaggacttccccatcctgcctggagagatcttcaagtacaagtggacagtgacagtggaggatggccccaccaagagtgaccccagatgcctgaccagatactatagtagctttgtgaacatggagagagacctggccagtggcctgattggcccccttctgatctgctacaaggagagtgtggaccagagaggcaaccagatcatgagtgacaagagaaatgtgatcctgttcagtgtgtttgatgagaacagaagttggtacctgacagagaacatccagagattcctgcccaaccctgctggagtgcagctggaggaccctgagttccaggccagcaacatcatgcacagcatcaatggctatgtgtttgacagcctgcagctgagtgtgtgcctgcatgaggtggcctattggtatatcctgagcattggagcccagacagacttcctgagtgtgttcttcagtggctacaccttcaagcacaagatggtgtatgaggacaccctgaccctgttccccttctctggagagacagtgttcatgtccatggagaaccctggcctgtggatcctgggctgccacaacagtgacttcagaaacagaggcatgacagcccttctgaaagttagcagttgtgacaagaacacaggagactactatgaggacagctatgaggacatcagtgcctacctgcttgtggagatgaaaaaggaggactttgacatctatgatgaggatgagaaccagagccccagaagcttccagaagaaaaccagacactacttcattgcggctgtggagagactgtgggactatggcatgagtagcagtccccatgtgctgagaaacagggcccagagtggcagtgtgccccagttcaaaaaggtggttttccaggagttcacagatggcagcttcacccagcccctgtaccgtggagagctgaatgagcacctgggccttctgggcccctacatcagagctgaggtggaggacaacatcatggtgaccttcagaaaccaggccagcagaccctacagcttctactcatccctgatctcttatgaagaggaccagagacagggagctgagcccagaaagaactttgtgaagcccaatgagaccaagacctacttctggaaggtgcagcaccacatggcccccaccaaggatgagtttgactgcaaggcctgggcctacttcagtgatgtggacctggagaaggatgtgcacagtggcctgattggccccctgcttgtgtgccacaccaacaccctgaaccctgctcatggcagacaagttactgtgcaggagtttgccctgttctttaccatctttgatgagaccaagagctggtacttcacagagaacatggagagaaactgcagagccccctgcaacatccagatggaggaccccaccttcaaggagaactacagattccatgccatcaatggctacatcatggacaccctgcctggcctggtgatggcccaggaccagagaatcaggtggtacctgcttagcatgggcagcaatgagaacatccacagcatccacttcagtggccatgtgttcacagtgagaaagaaagaggaatacaagatggccctgtacaacctgtaccctggagtgtttgagacagtggagatgctgcccagcaaggctggcatctggagagtggagtgcctgattggagagcacctgcatgctggcatgagcaccctgttcctggtgtacagcaacaagtgccagacccccctgggcatggccagtggccacatcagagacttccagatcacagccagtggccagtatggccagtgggcccccaagctggccagactgcactacagtggcagcatcaatgcctggagcaccaaggagcccttcagctggatcaaggtggacctgcttgcccccatgatcattcatggcatcaagacccagggagccagacagaagttcagcagtctgtacatcagccagttcatcattatgtacagcctggatggcaagaaatggcagacctacagaggcaacagcacaggcaccctgatggtgttctttggcaatgtggacagttctggcatcaagcacaacatcttcaacccccccatcattgccagatacatcagactgcaccccacccactacagcatcagaagcaccctgaggatggagctgatgggctgtgacctgaacagctgcagcatgcccctgggcatggagagcaaggccatcagtgatgctcagatcacagcctccagctacttcaccaacatgtttgccacctggagccccagcaaggccagactgcacctgcagggcagaagcaatgcctggagaccccaagttaataatcccaaggagtggctgcaggtggacttccagaagaccatgaaggtgacaggagtgacaacccagggagtgaagagcctgctgaccagcatgtatgtgaaggagttcctgatctccagtagccaggatggccaccagtggaccctgttctttcaaaatggcaaggtgaaggtgttccagggcaaccaggacagcttcacccctgtggtgaacagcctggacccccctctgcttacccgatacctgagaatccacccccagagctgggtgcaccagattgccctgagaatggaggtgctgggctgtgaggcccaggacctgtac

SEQ ID NO: 43 - DNA, 73 bp, Artificial sequence
  Core Nucleotide Sequence
agtggacttagcccctgtttgctcctccgataactggggtgaccttggttaatattcaccagcagcctccccc

SEQ ID NO: 44 - DNA, 6 bp, Artificial sequence
  TSS
tcagct

SEQ ID NO: 45 - DNA, 6 bp, Artificial sequence
  TSS
tcaggc

SEQ ID NO: 46 - DNA, 6 bp, Artificial sequence
  TSS
cactga

SEQ ID NO: 47 - DNA, 39 bp, Artificial sequence
  3' section of FRE49, FRE72 and FRE75 (297-335 of SEQ ID NO: 52)
tcagcttcaggcaccaccactgacctgggacagtgaatc

SEQ ID NO: 48 - DNA, 45 bp, Artificial sequence
  5' section of HLP2 (118-162 of SEQ ID:52)
tggacacaggacgctgtggtttctgagccagggggcgactcagat

SEQ ID NO: 49 - DNA, 41 bp, Artificial sequence
  3' section of HLP2 (243-283 of SEQ ID:52)
gttgcccctctggatccactgcttaaatacggacgaggaca

SEQ ID NO: 50 - DNA, 80 bp, Artificial sequence
  Extended core nucleotide sequence
cccagccagtggacttagcccctgtttgctcctccgataactggggtgaccttggttaatattcaccagcagcctccccc

SEQ ID NO: 51 - DNA, 119 bp, Artificial sequence
  FRE72 TRE
cccagccagtggacttagcccctgtttgctcctccgataactggggtgaccttggttaatattcaccagcagcctccccctcagcttcaggcaccaccactgacctgggacagtgaatc

SEQ ID NO: 52 - DNA, 335 bp, Artificial sequence
  HLP2 TRE
ccctaaaatgggcaaacattgcaagcagcaaacagcaaacacacagccctccctgcctgctgaccttggagctggggcagaggtcagacacctctctgggcccatgccacctccaactggacacaggacgctgtggtttctgagccagggggcgactcagatcccagccagtggacttagcccctgtttgctcctccgataactggggtgaccttggttaatattcaccagcagcctcccccgttgcccctctggatccactgcttaaatacggacgaggacagggccctgtctcctcagcttcaggcaccaccactgacctgggacagtgaatc

SEQ ID NO: 53 - protein, 19 aa, Artificial sequence
  signal peptide
MQIELSTCFFLCLLRFCFS

SEQ ID NO: 54 - DNA, 57 bp, Artificial sequence
  signal peptide
atgcaaatagagctctccacctgcttctttctgtgccttttgcgattctgctttagt

SEQ ID NO: 55 - DNA, 57 bp, Artificial sequence
  signal peptide
atgcagattgagctctccacctgcttcttcctctgcctcttgagattctgtttctct

SEQ ID NO: 56 - protein, 18 aa, Artificial sequence
  signal peptide
MKLLAATVLLLTICSLEG

SEQ ID NO: 57 - DNA, 54 bp, Artificial sequence
  signal peptide
atgaagctgctcgcagcaactgtgctactcctcaccatctgcagccttgaagga

SEQ ID NO: 58 - protein, 18 aa, Artificial sequence
  signal peptide
MKWVWALLLLAALGSGRA

SEQ ID NO: 59 - DNA, 54 bp, Artificial sequence
  signal peptide
atgaagtgggtgtgggcgctcttgctgttggcggcgctgggcagcggccgcgcg

SEQ ID NO: 60 - protein, 24 aa, Artificial sequence
  signal peptide
MPSSVSWGILLLAGLCCLVPVSLA

SEQ ID NO: 61 - DNA, 72 bp, Artificial sequence
  signal peptide
atgccgtcttctgtctcgtggggcatcctcctgctggcaggcctgtgctgcctggtccctgtctccctggct

SEQ ID NO: 62 - DNA, 4713 bp, Artificial sequence
  Factor VIII AAV construct
ttggccactccctctctgcgcgctcgctcgctcactgaggccgggcgaccaaaggtcgcccgacgcccgggctttgcccgggcggcctcagtgagcgagcgagcgcgcagagagggagtggccaactccatcactaggggttcctttaattaacccagccagtggacttagcccctgtttgctcctccgataactggggtgaccttggttaatattcaccagcagcctccccctcagcttcaggcaccaccactgacctgggacagtgaatcgcgccaccatgaagctgctcgcagcaactgtgctactcctcaccatctgcagccttgaaggagctactagaagatattatcttggggcagtggagctgagctgggactacatgcagtctgacctgggagaactgcctgtggatgccagatttccccctcgagtgcccaagagcttcccctttaacacctcagtggtgtacaagaagaccctgtttgtggagtttacagaccatctcttcaacattgctaagcccagacctccctggatgggcctgctgggccctaccatccaagctgaagtgtatgacactgttgtgatcacactcaagaacatggcctcccatcctgtgtccctgcatgcagtgggagtctcctactggaaggcctcagaaggagcagagtatgatgaccagaccagccagagagagaaggaggatgacaaggtgtttcctggagggagccacacctatgtgtggcaggtgctgaaggagaatggacctatggccagtgaccctctgtgtcttacctattcctacctgtcacatgtggatctggtgaaggacctgaacagtggcctgattggggctctgctggtttgcagagaaggcagcttggccaaggagaagacccaaaccctgcacaagttcatcctgctgtttgctgtgtttgatgaggggaaatcatggcactcagagaccaagaacagcctcatgcaggatagggatgctgccagtgccagggcttggcccaagatgcacactgtgaatggctatgtgaatagaagcctgcctgggctgataggctgtcacagaaaatctgtgtactggcatgtgattggcatgggcaccacacctgaggtgcactccattttcctggagggccacaccttccttgtgagaaaccacagacaagcttccctggagatcagcccaatcacctttctgactgctcaaaccctcctgatggatctgggccagttcctgctgttctgtcatatctcctcacaccagcatgatggaatggaagcttatgtcaaggtggactcctgcccagaggaaccacagctcagaatgaagaacaatgaggaggctgaggactatgatgatgacctgacagactctgaaatggatgtggtcagatttgatgatgacaacagcccttcattcatccaaatcagatctgtggccaagaagcatcccaagacctgggtgcactacatagctgctgaggaggaggactgggactatgcccctctggtcctggcccctgatgacagaagctataaaagccagtacctgaataatggcccccagagaattggcagaaagtacaagaaagtcagattcatggcttacactgatgagaccttcaaaaccagggaagccatccagcatgagtcaggcatcctgggccccctgctgtatggggaggttggagataccctgctgattatcttcaaaaaccaggcaagcaggccctacaatatctaccctcatggcatcactgatgtcaggccactgtattccagaagactgcctaagggggtgaagcacctgaaggacttcccaatcctgccaggggagattttcaaatacaagtggacagtgactgtggaggatggaccaaccaagtcagatcctagatgtctgaccagatactactccagctttgtgaacatggagagagacctggcctctggcctgattggccctctgctgatctgctataaagagtcagtggaccagagaggcaaccagatcatgagtgacaaaagaaatgtgatcttgttctcagtgtttgatgagaatagatcttggtacctcacagaaaacatccagaggttcctgcccaatccagctggggtgcagctggaagatccagaattccaggccagcaacatcatgcatagcatcaatggttatgtctttgacagcctgcagctgtcagtgtgtctgcatgaagttgcttactggtatattctgtccattggagcccagacagacttcctgtctgtcttcttctctggctacacctttaaacacaagatggtgtatgaggacaccctgaccctgttccctttctctggggaaacagtgttcatgtccatggaaaaccctggactgtggatcctgggctgccataacagtgacttcagaaacagaggcatgacagccctgctcaaggtgtccagctgtgataagaacacaggagactactatgaggatagctatgaggacatcagtgcttacctgctggtggaaatgaaaaaggaggattttgacatctatgatgaggatgagaaccagagccctagaagcttccagaaaaagactagacactacttcattgctgcagtggagagactctgggattatggcatgagctccagcccccatgtgctgagaaatagagctcagagtggcagtgtgccacagttcaagaaggtggtgtttcaggagttcactgatggctccttcacacaaccactttacagaggagaactgaatgagcacctgggcctcctgggcccctacatcagggctgaagtggaggataacattatggtcacatttaggaatcaggcttccagaccctactccttttattcctcactcatttcctatgaggaggaccagaggcagggagctgagcccagaaaaaattttgtgaaacccaatgaaaccaagacctacttctggaaggtgcagcaccatatggcccctaccaaggatgaatttgactgcaaggcttgggcttacttttctgatgtggaccttgagaaagatgtgcattcaggcctcattgggccactgctggtgtgccacaccaatacactgaaccctgctcatgggagacaggtcacagtgcaggagtttgcactcttctttaccatctttgatgagaccaagtcctggtatttcactgagaacatggagaggaactgcagggccccttgtaacatccagatggaggatcccaccttcaaggaaaactacagattccatgccatcaatggctacatcatggacaccctgccaggcctggtgatggcccaggaccagaggatcaggtggtacctcctgtctatgggcagcaatgaaaatatccacagcattcacttctctggacatgtgtttactgtgaggaagaaggaggaatacaagatggctctgtacaacctctaccctggggtgtttgaaacagtggagatgctgccctccaaggctggcatctggagagtggaatgtctgattggggagcatctgcatgctggcatgagcacactgttcctggtgtattccaacaagtgccagaccccactgggcatggcctcaggacatatcagggacttccagatcactgctagtggacaatatggacagtgggcacccaagctggccagactgcactactcaggctccatcaatgcctggagtaccaaggagcccttcagctggatcaaggtggacctgctggcccccatgattatacatggcatcaagacccagggagctagacagaagttcagctccctgtacatctcccaattcatcatcatgtactctctggatggcaagaaatggcagacctacagaggcaatagcactggcaccctgatggtgttttttggaaatgttgactcttctggcatcaagcacaacatcttcaacccccccatcattgccagatatatcaggctccaccccacccactactccataaggagcaccctgagaatggagctgatgggctgtgacctgaattcctgctccatgcccctgggcatggaatccaaggcaatctctgatgcacagatcacagcctcctcctacttcaccaacatgtttgcaacctggagcccctccaaggccagactgcacctgcagggcaggtccaatgcttggagaccacaagtgaacaacccaaaggagtggctgcaggtggacttccagaagaccatgaaagtgactggagtgaccacccagggagtgaaatccctgctcactagcatgtatgtgaaggaattcctgatcagtagctctcaagatggccaccagtggaccctgttcttccagaatggcaaggtgaaggtgtttcagggcaaccaggattccttcacccctgtggtgaatagcctggatcccccactgctgaccagatacctgagaatccacccccagtcctgggttcaccagattgccctgagaatggaggtgctgggctgtgaggcccaggacctgtactgaaataaaagatctttattttcattagatctgtgtgttggttttttgtgtgaggaacccctagtgatggagttggccactccctctctgcgcgctcgctcgctcactgaggccgggcgaccaaaggtcgcccgacgcccgggctttgcccgggcggcctcagtgagcgagcgagcgcgcagagagggagtggccaa

SEQ ID NO: 63 - DNA, 17 bp, Artificial sequence
  polyA sequence
aaataaaatacgaaatg

SEQ ID NO: 64 - DNA, 32 bp, Artificial sequence
  polyA sequence
aataaaatacgaaatgaattcgtaatcatgtc

SEQ ID NO: 65 - DNA, 49 bp, Artificial sequence
  polyA sequence
aataaaagatctttattttcattagatctgtgtgttggttttttgtgtg

SEQ ID NO: 66 - DNA, 208 bp, Artificial sequence
  polyA sequence
ctgtgccttctagttgccagccatctgttgtttgcccctcccccgtgccttccttgaccctggaaggtgccactcccactgtcctttcctaataaaatgaggaaattgcatcgcattgtctgagtaggtgtcattctattctggggggtggggtggggcaggacagcaagggggaggattgggaagacaatagcaggcatgctgggga

SEQ ID NO: 67 - DNA, 145 bp, Artificial sequence
  5' ITR from AAV 2
ttggccactccctctctgcgcgctcgctcgctcactgaggccgggcgaccaaaggtcgcccgacgcccgggctttgcccgggcggcctcagtgagcgagcgagcgcgcagagagggagtggccaactccatcactaggggttcct

SEQ ID NO: 68 - protein, 736 aa, Artificial sequence
  Amino acid sequence of AAV capsid
MAADGYLPDWLEDNLSEGIREWWALKPGAPKPKANQQKQDDGRGLVLPGYKYLGPFNGLDKGEPVNAADAAALEHDKAYDQQLQAGDNPYLRYNHADAEFQERLQEDTSFGGNLGRAVFQAKKRVLEPLGLVEEGAKTAPGKKRPVDQSPQEPDSSSGVGKSGKQPARKRLNFGQTGDSESVPDPQPLGEPPAAPTSLGSNTMASGGGAPMADNNEGADGVGNSSGNWHCDSQWLGDRVITTSTRTWALPTYNNHLYKQISSQSGASNDNHYFGYSTPWGYFDFNRFHCHFSPRDWQRLINNNWGFRPKKLSFKLFNIQVKEVTQNDGTTTIANNLTSTVQVFTDSEYQLPYVLGSAHQGCLPPFPADVFMVPQYGYLTLNNGSQAVGRSSFYCLEYFPSQMLRTGNNFQFSYTFEDVPFHSSYAHSQSLDRLMNPLIDQYLYYLNRTQGTTSGTTNQSRLLFSQAGPQSMSLQARNWLPGPCYRQQRLSKTANDNNNSNFPWTAASKYHLNGRDSLVNPGPAMASHKDDEEKFFPMHGNLIFGKEGTTASNAELDNVMITDEEEIRTTNPVATEQYGTVANNLQSSNTAPTTRTVNDQGALPGMVWQDRDVYLQGPIWAKIPHTDGHFHPSPLMGGFGLKHPPPQIMIKNTPVPANPPTTFSPAKFASFITQYSTGQVSVEIEWELQKENSKRWNPEIQYTSNYNKSVNVDFTVDTNGVYSEPRPIGTRYLTRNL

SEQ ID NO: 69 - protein, 724 aa, Adeno-associated virus 5
MSFVDHPPDWLEEVGEGLREFLGLEAGPPKPKPNQQHQDQARGLVLPGYNYLGPGNGLDRGEPVNRADEVAREHDISYNEQLEAGDNPYLKYNHADAEFQEKLADDTSFGGNLGKAVFQAKKRVLEPFGLVEEGAKTAPTGKRIDDHFPKRKKARTEEDSKPSTSSDAEAGPSGSQQLQIPAQPASSLGADTMSAGGGGPLGDNNQGADGVGNASGDWHCDSTWMGDRVVTKSTRTWVLPSYNNHQYREIKSGSVDGSNANAYFGYSTPWGYFDFNRFHSHWSPRDWQRLINNYWGFRPRSLRVKIFNIQVKEVTVQDSTTTIANNLTSTVQVFTDDDYQLPYVVGNGTEGCLPAFPPQVFTLPQYGYATLNRDNTENPTERSSFFCLEYFPSKMLRTGNNFEFTYNFEEVPFHSSFAPSQNLFKLANPLVDQYLYRFVSTNNTGGVQFNKNLAGRYANTYKNWFPGPMGRTQGWNLGSGVNRASVSAFATTNRMELEGASYQVPPQPNGMTNNLQGSNTYALENTMIFNSQPANPGTTATYLEGNMLITSESETQPVNRVAYNVGGQMATNNQSSTTAPATGTYNLQEIVPGSVWMERDVYLQGPIWAKIPETGAHFHPSPAMGGFGLKHPPPMMLIKNTPVPGNITSFSDVPVSSFITQYSTGQVTVEMEWELKKENSKRWNPEIQYTNNYNDPQFVDFAPDSTGEYRTTRPIGTRYLTRPL

SEQ ID NO: 70 - DNA, 145 bp, Artificial sequence
  3' ITR from AAV 2
aggaacccctagtgatggagttggccactccctctctgcgcgctcgctcgctcactgaggccgggcgaccaaaggtcgcccgacgcccgggctttgcccgggcggcctcagtgagcgagcgagcgcgcagagagggagtggccaa

SEQ ID NO: 71 - DNA, 4713 bp, Artificial Sequence
  FVIII AAV construct (26-96-106)
ttggccactccctctctgcgcgctcgctcgctcactgaggccgggcgaccaaaggtcgcccgacgcccgggctttgcccgggcggcctcagtgagcgagcgagcgcgcagagagggagtggccaactccatcactaggggttcctttaattaacccagccagtggacttagcccctgtttgctcctccgataactggggtgaccttggttaatattcaccagcagcctccccctcagcttcaggcaccaccactgacctgggacagtgaatcgcgccaccatgaagctgctcgcagcaactgtgctactcctcaccatctgcagccttgaaggagctactagaagatattatcttggggcagtggagctgagctgggactacatgcagtctgacctgggagaactgcctgtggatgccagatttccccctcgagtgcccaagagcttcccctttaacacctcagtggtgtacaagaagaccctgtttgtggagtttacagaccatctcttcaacattgctaagcccagacctccctggatgggcctgctgggccctaccatccaagctgaagtgtatgacactgttgtgatcacactcaagaacatggcctcccatcctgtgtccctgcatgcagtgggagtctcctactggaaggcctcagaaggagcagagtatgatgaccagaccagccagagagagaaggaggatgacaaggtgtttcctggagggagccacacctatgtgtggcaggtgctgaaggagaatggacctatggccagtgaccctctgtgtcttacctattcctacctgtcacatgtggatctggtgaaggacctgaacagtggcctgattggggctctgctggtttgcagagaaggcagcttggccaaggagaagacccaaaccctgcacaagttcatcctgctgtttgctgtgtttgatgaggggaaatcatggcactcagagaccaagaacagcctcatgcaggatagggatgctgccagtgccagggcttggcccaagatgcacactgtgaatggctatgtgaatagaagcctgcctgggctgataggctgtcacagaaaatctgtgtactggcatgtgattggcatgggcaccacacctgaggtgcactccattttcctggagggccacaccttccttgtgagaaaccacagacaagcttccctggagatcagcccaatcacctttctgactgctcaaaccctcctgatggatctgggccagttcctgctgttctgtcatatctcctcacaccagcatgatggaatggaagcttatgtcaaggtggactcctgcccagaggaaccacagctcagaatgaagaacaatgaggaggctgaggactatgatgatgacctgacagactctgaaatggatgtggtcagatttgatgatgacaacagcccttcattcatccaaatcagatctgtggccaagaagcatcccaagacctgggtgcactacatagctgctgaggaggaggactgggactatgcccctctggtcctggcccctgatgacagaagctataaaagccagtacctgaataatggcccccagagaattggcagaaagtacaagaaagtcagattcatggcttacactgatgagaccttcaaaaccagggaagccatccagcatgagtcaggcatcctgggccccctgctgtatggggaggttggagataccctgctgattatcttcaaaaaccaggcaagcaggccctacaatatctaccctcatggcatcactgatgtcaggccactgtattccagaagactgcctaagggggtgaagcacctgaaggacttcccaatcctgccaggggagattttcaaatacaagtggacagtgactgtggaggatggaccaaccaagtcagatcctagatgtctgaccagatactactccagctttgtgaacatggagagagacctggcctctggcctgattggccctctgctgatctgctataaagagtcagtggaccagagaggcaaccagatcatgagtgacaaaagaaatgtgatcttgttctcagtgtttgatgagaatagatcttggtacctcacagaaaacatccagaggttcctgcccaatccagctggggtgcagctggaagatccagaattccaggccagcaacatcatgcatagcatcaatggttatgtctttgacagcctgcagctgtcagtgtgtctgcatgaagttgcttactggtatattctgtccattggagcccagacagacttcctgtctgtcttcttctctggctacacctttaaacacaagtgggtgtatgaggacaccctgaccctgttccctttctctggggaaacagtgttcatgtccatggaaaaccctggactgtggatcctgggctgccataacagtgacttcagaaacagaggcatgacagccctgctcaaggtgtccagctgtgataagaacacaggagactactatgaggatagctatgaggacatcagtgcttacctgctggtggaaatgaaaaaggaggattttgacatctatgatgaggatgagaaccagagccctagaagcttccagaaaaagactagacactacttcattgctgcagtggagagactctgggattatggcatgagctccagcccccatgtgctgagaaatagagctcagagtggcagtgtgccacagttcaagaaggtggtgtttcaggagttcactgatggctccttcacacaaccactttacagaggagaactgaatgagcacctgggcctcctgggcccctacatcagggctgaagtggaggataacattatggtcacatttaggaatcaggcttccagaccctactccttttattcctcactcatttcctatgaggaggaccagaggcagggagctgagcccagaaaaaattttgtgaaacccaatgaaaccaagacctacttctggaaggtgcagcaccatatggcccctaccaaggatgaatttgactgcaaggcttgggcttacttttctgatgtggaccttgagaaagatgtgcattcaggcctcattgggccactgctggtgtgccacaccaatacactgaaccctgctcatgggagacaggtcacagtgcaggagtttgcactcttctttaccatctttgatgagaccaagtcctggtatttcactgagaacatggagaggaactgcagggccccttgtaacatccagatggaggatcccaccttcaaggaaaactacagattccatgccatcaatggctacatcatggacaccctgccaggcctggtgatggcccaggaccagaggatcaggtggtacctcctgtctatgggcagcaatgaaaatatccacagcattcacttctctggacatgtgtttactgtgaggaagaaggaggaatacaagatggctctgtacaacctctaccctggggtgtttgaaacagtggagatgctgccctccaaggctggcatctggagagtggaatgtctgattggggagcatctgcatgctggcatgagcacactgttcctggtgtattccaacaagtgccagaccccactgggcatggcctcaggacatatcagggacttccagatcactgctagtggacaatatggacagtgggcacccaagctggccagactgcactactcaggctccatcaatgcctggagtaccaaggagcccttcagctggatcaaggtggacctgctggcccccatgattatacatggcatcaagacccagggagctagacagaagttcagctccctgtacatctcccaattcatcatcatgtactctctggatggcaagaaatggcagacctacagaggcaatagcactggcaccctgatggtgttttttggaaatgttgactcttctggcatcaagcacaacatcttcaacccccccatcattgccagatatatcaggctccaccccacccactactccataaggagcaccctgagaatggagctgatgggctgtgacctgaattcctgctccatgcccctgggcatggaatccaaggcaatctctgatgcacagatcacagcctcctcctacttcaccaacatgtttgcaacctggagcccctccaaggccagactgcacctgcagggcaggtccaatgcttggagaccacaagtgaacaacccaaaggagtggctgcaggtggacttccagaagaccatgaaagtgactggagtgaccacccagggagtgaaatccctgctcactagcatgtatgtgaaggaattcctgatcagtagctctcaagatggccaccagtggaccctgttcttccagaatggcaaggtgaaggtgtttcagggcaaccaggattccttcacccctgtggtgaatagcctggatcccccactgctgaccagatacctgagaatccacccccagtcctgggttcaccagattgccctgagaatggaggtgctgggctgtgaggcccaggacctgtactgaaataaaagatctttattttcattagatctgtgtgttggttttttgtgtgaggaacccctagtgatggagttggccactccctctctgcgcgctcgctcgctcactgaggccgggcgaccaaaggtcgcccgacgcccgggctttgcccgggcggcctcagtgagcgagcgagcgcgcagagagggagtggccaa

SEQ ID NO: 72 - DNA, 4970 bp, Artificial Sequence
  FVIII AAV construct (SEQ ID NO:1 from WO 2017/053677)
ttggccactccctctctgcgcgctcgctcgctcactgaggccgcccgggcaaagcccgggcgtcgggcgacctttggtcgcccggcctcagtgagcgagcgagcgcgcagagagggagtggccaactccatcactaggggttcctgtttgctgcttgcaatgtttgcccattttagggtggacacaggacgctgtggtttctgagccagggggcgactcagatcccagccagtggacttagcccctgtttgctcctccgataactggggtgaccttggttaatattcaccagcagcctcccccgttgcccctctggatccactgcttaaatacggacgaggacagggccctgtctcctcagcttcaggcaccaccactgacctgggacagtgaatcgccaccatgcagattgagctgagcacctgcttcttcctgtgcctgctgaggttctgcttctctgccaccaggagatactacctgggggctgtggagctgagctgggactacatgcagtctgacctgggggagctgcctgtggatgccaggttcccccccagagtgcccaagagcttccccttcaacacctctgtggtgtacaagaagaccctgtttgtggagttcactgaccacctgttcaacattgccaagcccaggcccccctggatgggcctgctgggccccaccatccaggctgaggtgtatgacactgtggtgatcaccctgaagaacatggccagccaccctgtgagcctgcatgctgtgggggtgagctactggaaggcctctgagggggctgagtatgatgaccagaccagccagagggagaaggaggatgacaaggtgttccctgggggcagccacacctatgtgtggcaggtgctgaaggagaatggccccatggcctctgaccccctgtgcctgacctacagctacctgagccatgtggacctggtgaaggacctgaactctggcctgattggggccctgctggtgtgcagggagggcagcctggccaaggagaagacccagaccctgcacaagttcatcctgctgtttgctgtgtttgatgagggcaagagctggcactctgaaaccaagaacagcctgatgcaggacagggatgctgcctctgccagggcctggcccaagatgcacactgtgaatggctatgtgaacaggagcctgcctggcctgattggctgccacaggaagtctgtgtactggcatgtgattggcatgggcaccacccctgaggtgcacagcatcttcctggagggccacaccttcctggtcaggaaccacaggcaggccagcctggagatcagccccatcaccttcctgactgcccagaccctgctgatggacctgggccagttcctgctgttctgccacatcagcagccaccagcatgatggcatggaggcctatgtgaaggtggacagctgccctgaggagccccagctgaggatgaagaacaatgaggaggctgaggactatgatgatgacctgactgactctgagatggatgtggtgaggtttgatgatgacaacagccccagcttcatccagatcaggtctgtggccaagaagcaccccaagacctgggtgcactacattgctgctgaggaggaggactgggactatgcccccctggtgctggcccctgatgacaggagctacaagagccagtacctgaacaatggcccccagaggattggcaggaagtacaagaaggtcaggttcatggcctacactgatgaaaccttcaagaccagggaggccatccagcatgagtctggcatcctgggccccctgctgtatggggaggtgggggacaccctgctgatcatcttcaagaaccaggccagcaggccctacaacatctacccccatggcatcactgatgtgaggcccctgtacagcaggaggctgcccaagggggtgaagcacctgaaggacttccccatcctgcctggggagatcttcaagtacaagtggactgtgactgtggaggatggccccaccaagtctgaccccaggtgcctgaccagatactacagcagctttgtgaacatggagagggacctggcctctggcctgattggccccctgctgatctgctacaaggagtctgtggaccagaggggcaaccagatcatgtctgacaagaggaatgtgatcctgttctctgtgtttgatgagaacaggagctggtacctgactgagaacatccagaggttcctgcccaaccctgctggggtgcagctggaggaccctgagttccaggccagcaacatcatgcacagcatcaatggctatgtgtttgacagcctgcagctgtctgtgtgcctgcatgaggtggcctactggtacatcctgagcattggggcccagactgacttcctgtctgtgttcttctctggctacaccttcaagcacaagatggtgtatgaggacaccctgaccctgttccccttctctggggagactgtgttcatgagcatggagaaccctggcctgtggattctgggctgccacaactctgacttcaggaacaggggcatgactgccctgctgaaagtctccagctgtgacaagaacactggggactactatgaggacagctatgaggacatctctgcctacctgctgagcaagaacaatgccattgagcccaggagcttcagccagaaccccccagtgctgaagaggcaccagagggagatcaccaggaccaccctgcagtctgaccaggaggagattgactatgatgacaccatctctgtggagatgaagaaggaggactttgacatctacgacgaggacgagaaccagagccccaggagcttccagaagaagaccaggcactacttcattgctgctgtggagaggctgtgggactatggcatgagcagcagcccccatgtgctgaggaacagggcccagtctggctctgtgccccagttcaagaaggtggtgttccaggagttcactgatggcagcttcacccagcccctgtacagaggggagctgaatgagcacctgggcctgctgggcccctacatcagggctgaggtggaggacaacatcatggtgaccttcaggaaccaggccagcaggccctacagcttctacagcagcctgatcagctatgaggaggaccagaggcagggggctgagcccaggaagaactttgtgaagcccaatgaaaccaagacctacttctggaaggtgcagcaccacatggcccccaccaaggatgagtttgactgcaaggcctgggcctacttctctgatgtggacctggagaaggatgtgcactctggcctgattggccccctgctggtgtgccacaccaacaccctgaaccctgcccatggcaggcaggtgactgtgcaggagtttgccctgttcttcaccatctttgatgaaaccaagagctggtacttcactgagaacatggagaggaactgcagggccccctgcaacatccagatggaggaccccaccttcaaggagaactacaggttccatgccatcaatggctacatcatggacaccctgcctggcctggtgatggcccaggaccagaggatcaggtggtacctgctgagcatgggcagcaatgagaacatccacagcatccacttctctggccatgtgttcactgtgaggaagaaggaggagtacaagatggccctgtacaacctgtaccctggggtgtttgagactgtggagatgctgcccagcaaggctggcatctggagggtggagtgcctgattggggagcacctgcatgctggcatgagcaccctgttcctggtgtacagcaacaagtgccagacccccctgggcatggcctctggccacatcagggacttccagatcactgcctctggccagtatggccagtgggcccccaagctggccaggctgcactactctggcagcatcaatgcctggagcaccaaggagcccttcagctggatcaaggtggacctgctggcccccatgatcatccatggcatcaagacccagggggccaggcagaagttcagcagcctgtacatcagccagttcatcatcatgtacagcctggatggcaagaagtggcagacctacaggggcaacagcactggcaccctgatggtgttctttggcaatgtggacagctctggcatcaagcacaacatcttcaacccccccatcattgccagatacatcaggctgcaccccacccactacagcatcaggagcaccctgaggatggagctgatgggctgtgacctgaacagctgcagcatgcccctgggcatggagagcaaggccatctctgatgcccagatcactgccagcagctacttcaccaacatgtttgccacctggagccccagcaaggccaggctgcacctgcagggcaggagcaatgcctggaggccccaggtcaacaaccccaaggagtggctgcaggtggacttccagaagaccatgaaggtgactggggtgaccacccagggggtgaagagcctgctgaccagcatgtatgtgaaggagttcctgatcagcagcagccaggatggccaccagtggaccctgttcttccagaatggcaaggtgaaggtgttccagggcaaccaggacagcttcacccctgtggtgaacagcctggacccccccctgctgaccagatacctgaggattcacccccagagctgggtgcaccagattgccctgaggatggaggtgctgggctgtgaggcccaggacctgtactgaaataaaagatctttattttcattagatctgtgtgttggttttttgtgtgaggaacccctagtgatggagttggccactccctctctgcgcgctcgctcgctcactgaggccgggcgaccaaaggtcgcccgacgcccgggctttgcccgggcggcctcagtgagcgagcgagcgcgcagagagggagtggccaa

SEQ ID NO: 73 - DNA, 4845 bp, Artificial Sequence
  FVIII AAV construct (SQ)
ttggccactccctctctgcgcgctcgctcgctcactgaggccgggcgaccaaaggtcgcccgacgcccgggctttgcccgggcggcctcagtgagcgagcgagcgcgcagagagggagtggccaactccatcactaggggttcctttaattaacccagccagtggacttagcccctgtttgctcctccgataactggggtgaccttggttaatattcaccagcagcctccccctcagcttcaggcaccaccactgacctgggacagtgaatcgcgccaccatgaagctgctcgcagcaactgtgctactcctcaccatctgcagccttgaaggagctactagaagatattatcttggggcagtggagctgagctgggactacatgcagtctgacctgggagaactgcctgtggatgccagatttccccctcgagtgcccaagagcttcccctttaacacctcagtggtgtacaagaagaccctgtttgtggagtttacagaccatctcttcaacattgctaagcccagacctccctggatgggcctgctgggccctaccatccaagctgaagtgtatgacactgttgtgatcacactcaagaacatggcctcccatcctgtgtccctgcatgcagtgggagtctcctactggaaggcctcagaaggagcagagtatgatgaccagaccagccagagagagaaggaggatgacaaggtgtttcctggagggagccacacctatgtgtggcaggtgctgaaggagaatggacctatggccagtgaccctctgtgtcttacctattcctacctgtcacatgtggatctggtgaaggacctgaacagtggcctgattggggctctgctggtttgcagagaaggcagcttggccaaggagaagacccaaaccctgcacaagttcatcctgctgtttgctgtgtttgatgaggggaaatcatggcactcagagaccaagaacagcctcatgcaggatagggatgctgccagtgccagggcttggcccaagatgcacactgtgaatggctatgtgaatagaagcctgcctgggctgataggctgtcacagaaaatctgtgtactggcatgtgattggcatgggcaccacacctgaggtgcactccattttcctggagggccacaccttccttgtgagaaaccacagacaagcttccctggagatcagcccaatcacctttctgactgctcaaaccctcctgatggatctgggccagttcctgctgttctgtcatatctcctcacaccagcatgatggaatggaagcttatgtcaaggtggactcctgcccagaggaaccacagctcagaatgaagaacaatgaggaggctgaggactatgatgatgacctgacagactctgaaatggatgtggtcagatttgatgatgacaacagcccttcattcatccaaatcagatctgtggccaagaagcatcccaagacctgggtgcactacatagctgctgaggaggaggactgggactatgcccctctggtcctggcccctgatgacagaagctataaaagccagtacctgaataatggcccccagagaattggcagaaagtacaagaaagtcagattcatggcttacactgatgagaccttcaaaaccagggaagccatccagcatgagtcaggcatcctgggccccctgctgtatggggaggttggagataccctgctgattatcttcaaaaaccaggcaagcaggccctacaatatctaccctcatggcatcactgatgtcaggccactgtattccagaagactgcctaagggggtgaagcacctgaaggacttcccaatcctgccaggggagattttcaaatacaagtggacagtgactgtggaggatggaccaaccaagtcagatcctagatgtctgaccagatactactccagctttgtgaacatggagagagacctggcctctggcctgattggccctctgctgatctgctataaagagtcagtggaccagagaggcaaccagatcatgagtgacaaaagaaatgtgatcttgttctcagtgtttgatgagaatagatcttggtacctcacagaaaacatccagaggttcctgcccaatccagctggggtgcagctggaagatccagaattccaggccagcaacatcatgcatagcatcaatggttatgtctttgacagcctgcagctgtcagtgtgtctgcatgaagttgcttactggtatattctgtccattggagcccagacagacttcctgtctgtcttcttctctggctacacctttaaacacaagatggtgtatgaggacaccctgaccctgttccctttctctggggaaacagtgttcatgtccatggaaaaccctggactgtggatcctgggctgccataacagtgacttcagaaacagaggcatgacagccctgctcaaggtgtccagctgtgataagaacacaggagactactatgaggatagctatgaggacatcagtgcttacctgctgagcaagaataatgccattgaacccaggtcattttcccaaaatccccctgtgctgaaaaggcaccagagggagatcacgcgtaccaccctgcagagtgaccaggaggaaattgattatgatgacaccatctctgtggaaatgaaaaaggaggattttgacatctatgatgaggatgagaaccagagccctagaagcttccagaaaaagactagacactacttcattgctgcagtggagagactctgggattatggcatgagctccagcccccatgtgctgagaaatagagctcagagtggcagtgtgccacagttcaagaaggtggtgtttcaggagttcactgatggctccttcacacaaccactttacagaggagaactgaatgagcacctgggcctcctgggcccctacatcagggctgaagtggaggataacattatggtcacatttaggaatcaggcttccagaccctactccttttattcctcactcatttcctatgaggaggaccagaggcagggagctgagcccagaaaaaattttgtgaaacccaatgaaaccaagacctacttctggaaggtgcagcaccatatggcccctaccaaggatgaatttgactgcaaggcttgggcttacttttctgatgtggaccttgagaaagatgtgcattcaggcctcattgggccactgctggtgtgccacaccaatacactgaaccctgctcatgggagacaggtcacagtgcaggagtttgcactcttctttaccatctttgatgagaccaagtcctggtatttcactgagaacatggagaggaactgcagggccccttgtaacatccagatggaggatcccaccttcaaggaaaactacagattccatgccatcaatggctacatcatggacaccctgccaggcctggtgatggcccaggaccagaggatcaggtggtacctcctgtctatgggcagcaatgaaaatatccacagcattcacttctctggacatgtgtttactgtgaggaagaaggaggaatacaagatggctctgtacaacctctaccctggggtgtttgaaacagtggagatgctgccctccaaggctggcatctggagagtggaatgtctgattggggagcatctgcatgctggcatgagcacactgttcctggtgtattccaacaagtgccagaccccactgggcatggcctcaggacatatcagggacttccagatcactgctagtggacaatatggacagtgggcacccaagctggccagactgcactactcaggctccatcaatgcctggagtaccaaggagcccttcagctggatcaaggtggacctgctggcccccatgattatacatggcatcaagacccagggagctagacagaagttcagctccctgtacatctcccaattcatcatcatgtactctctggatggcaagaaatggcagacctacagaggcaatagcactggcaccctgatggtgttttttggaaatgttgactcttctggcatcaagcacaacatcttcaacccccccatcattgccagatatatcaggctccaccccacccactactccataaggagcaccctgagaatggagctgatgggctgtgacctgaattcctgctccatgcccctgggcatggaatccaaggcaatctctgatgcacagatcacagcctcctcctacttcaccaacatgtttgcaacctggagcccctccaaggccagactgcacctgcagggcaggtccaatgcttggagaccacaagtgaacaacccaaaggagtggctgcaggtggacttccagaagaccatgaaagtgactggagtgaccacccagggagtgaaatccctgctcactagcatgtatgtgaaggaattcctgatcagtagctctcaagatggccaccagtggaccctgttcttccagaatggcaaggtgaaggtgtttcagggcaaccaggattccttcacccctgtggtgaatagcctggatcccccactgctgaccagatacctgagaatccacccccagtcctgggttcaccagattgccctgagaatggaggtgctgggctgtgaggcccaggacctgtactgaaataaaagatctttattttcattagatctgtgtgttggttttttgtgtgaggaacccctagtgatggagttggccactccctctctgcgcgctcgctcgctcactgaggccgggcgaccaaaggtcgcccgacgcccgggctttgcccgggcggcctcagtgagcgagcgagcgcgcagagagggagtggccaa

SEQ ID NO: 74 - DNA, 4845 bp, Artificial Sequence
  FVIII AAV construct (26-SQ)
ttggccactccctctctgcgcgctcgctcgctcactgaggccgggcgaccaaaggtcgcccgacgcccgggctttgcccgggcggcctcagtgagcgagcgagcgcgcagagagggagtggccaactccatcactaggggttcctttaattaacccagccagtggacttagcccctgtttgctcctccgataactggggtgaccttggttaatattcaccagcagcctccccctcagcttcaggcaccaccactgacctgggacagtgaatcgcgccaccatgaagctgctcgcagcaactgtgctactcctcaccatctgcagccttgaaggagctactagaagatattatcttggggcagtggagctgagctgggactacatgcagtctgacctgggagaactgcctgtggatgccagatttccccctcgagtgcccaagagcttcccctttaacacctcagtggtgtacaagaagaccctgtttgtggagtttacagaccatctcttcaacattgctaagcccagacctccctggatgggcctgctgggccctaccatccaagctgaagtgtatgacactgttgtgatcacactcaagaacatggcctcccatcctgtgtccctgcatgcagtgggagtctcctactggaaggcctcagaaggagcagagtatgatgaccagaccagccagagagagaaggaggatgacaaggtgtttcctggagggagccacacctatgtgtggcaggtgctgaaggagaatggacctatggccagtgaccctctgtgtcttacctattcctacctgtcacatgtggatctggtgaaggacctgaacagtggcctgattggggctctgctggtttgcagagaaggcagcttggccaaggagaagacccaaaccctgcacaagttcatcctgctgtttgctgtgtttgatgaggggaaatcatggcactcagagaccaagaacagcctcatgcaggatagggatgctgccagtgccagggcttggcccaagatgcacactgtgaatggctatgtgaatagaagcctgcctgggctgataggctgtcacagaaaatctgtgtactggcatgtgattggcatgggcaccacacctgaggtgcactccattttcctggagggccacaccttccttgtgagaaaccacagacaagcttccctggagatcagcccaatcacctttctgactgctcaaaccctcctgatggatctgggccagttcctgctgttctgtcatatctcctcacaccagcatgatggaatggaagcttatgtcaaggtggactcctgcccagaggaaccacagctcagaatgaagaacaatgaggaggctgaggactatgatgatgacctgacagactctgaaatggatgtggtcagatttgatgatgacaacagcccttcattcatccaaatcagatctgtggccaagaagcatcccaagacctgggtgcactacatagctgctgaggaggaggactgggactatgcccctctggtcctggcccctgatgacagaagctataaaagccagtacctgaataatggcccccagagaattggcagaaagtacaagaaagtcagattcatggcttacactgatgagaccttcaaaaccagggaagccatccagcatgagtcaggcatcctgggccccctgctgtatggggaggttggagataccctgctgattatcttcaaaaaccaggcaagcaggccctacaatatctaccctcatggcatcactgatgtcaggccactgtattccagaagactgcctaagggggtgaagcacctgaaggacttcccaatcctgccaggggagattttcaaatacaagtggacagtgactgtggaggatggaccaaccaagtcagatcctagatgtctgaccagatactactccagctttgtgaacatggagagagacctggcctctggcctgattggccctctgctgatctgctataaagagtcagtggaccagagaggcaaccagatcatgagtgacaaaagaaatgtgatcttgttctcagtgtttgatgagaatagatcttggtacctcacagaaaacatccagaggttcctgcccaatccagctggggtgcagctggaagatccagaattccaggccagcaacatcatgcatagcatcaatggttatgtctttgacagcctgcagctgtcagtgtgtctgcatgaagttgcttactggtatattctgtccattggagcccagacagacttcctgtctgtcttcttctctggctacacctttaaacacaagtgggtgtatgaggacaccctgaccctgttccctttctctggggaaacagtgttctggtccatggaaaaccctggactgtggatcctgggctgccataacagtgacttcagaaacagaggcatgacagccctgctcaaggtgtccagctgtgataagaacacaggagactactatgaggatagctatgaggacatcagtgcttacctgctgagcaagaataatgccattgaacccaggtcattttcccaaaatccccctgtgctgaaaaggcaccagagggagatcacgcgtaccaccctgcagagtgaccaggaggaaattgattatgatgacaccatctctgtggaaatgaaaaaggaggattttgacatctatgatgaggatgagaaccagagccctagaagcttccagaaaaagactagacactacttcattgctgcagtggagagactctgggattatggcatgagctccagcccccatgtgctgagaaatagagctcagagtggcagtgtgccacagttcaagaaggtggtgtttcaggagttcactgatggctccttcacacaaccactttacagaggagaactgaatgagcacctgggcctcctgggcccctacatcagggctgaagtggaggataacattatggtcacatttaggaatcaggcttccagaccctactccttttattcctcactcatttcctatgaggaggaccagaggcagggagctgagcccagaaaaaattttgtgaaacccaatgaaaccaagacctacttctggaaggtgcagcaccatatggcccctaccaaggatgaatttgactgcaaggcttgggcttacttttctgatgtggaccttgagaaagatgtgcattcaggcctcattgggccactgctggtgtgccacaccaatacactgaaccctgctcatgggagacaggtcacagtgcaggagtttgcactcttctttaccatctttgatgagaccaagtcctggtatttcactgagaacatggagaggaactgcagggccccttgtaacatccagatggaggatcccaccttcaaggaaaactacagattccatgccatcaatggctacatcatggacaccctgccaggcctggtgatggcccaggaccagaggatcaggtggtacctcctgtctatgggcagcaatgaaaatatccacagcattcacttctctggacatgtgtttactgtgaggaagaaggaggaatacaagatggctctgtacaacctctaccctggggtgtttgaaacagtggagatgctgccctccaaggctggcatctggagagtggaatgtctgattggggagcatctgcatgctggcatgagcacactgttcctggtgtattccaacaagtgccagaccccactgggcatggcctcaggacatatcagggacttccagatcactgctagtggacaatatggacagtgggcacccaagctggccagactgcactactcaggctccatcaatgcctggagtaccaaggagcccttcagctggatcaaggtggacctgctggcccccatgattatacatggcatcaagacccagggagctagacagaagttcagctccctgtacatctcccaattcatcatcatgtactctctggatggcaagaaatggcagacctacagaggcaatagcactggcaccctgatggtgttttttggaaatgttgactcttctggcatcaagcacaacatcttcaacccccccatcattgccagatatatcaggctccaccccacccactactccataaggagcaccctgagaatggagctgatgggctgtgacctgaattcctgctccatgcccctgggcatggaatccaaggcaatctctgatgcacagatcacagcctcctcctacttcaccaacatgtttgcaacctggagcccctccaaggccagactgcacctgcagggcaggtccaatgcttggagaccacaagtgaacaacccaaaggagtggctgcaggtggacttccagaagaccatgaaagtgactggagtgaccacccagggagtgaaatccctgctcactagcatgtatgtgaaggaattcctgatcagtagctctcaagatggccaccagtggaccctgttcttccagaatggcaaggtgaaggtgtttcagggcaaccaggattccttcacccctgtggtgaatagcctggatcccccactgctgaccagatacctgagaatccacccccagtcctgggttcaccagattgccctgagaatggaggtgctgggctgtgaggcccaggacctgtactgaaataaaagatctttattttcattagatctgtgtgttggttttttgtgtgaggaacccctagtgatggagttggccactccctctctgcgcgctcgctcgctcactgaggccgggcgaccaaaggtcgcccgacgcccgggctttgcccgggcggcctcagtgagcgagcgagcgcgcagagagggagtggccaa

SEQ ID NO: 75 - DNA, 4182 bp, Artificial Sequence
  Codop19 (Co19) nucleotide sequence encoding FVIII 26-96-106
gctactagaagatattatcttggggcagtggagctgagctgggactacatgcagtctgacctgggagaactgcctgtggatgccagatttccccctcgagtgcccaagagcttcccctttaacacctcagtggtgtacaagaagaccctgtttgtggagtttacagaccatctcttcaacattgctaagcccagacctccctggatgggcctgctgggccctaccatccaagctgaagtgtatgacactgttgtgatcacactcaagaacatggcctcccatcctgtgtccctgcatgcagtgggagtctcctactggaaggcctcagaaggagcagagtatgatgaccagaccagccagagagagaaggaggatgacaaggtgtttcctggagggagccacacctatgtgtggcaggtgctgaaggagaatggacctatggccagtgaccctctgtgtcttacctattcctacctgtcacatgtggatctggtgaaggacctgaacagtggcctgattggggctctgctggtttgcagagaaggcagcttggccaaggagaagacccaaaccctgcacaagttcatcctgctgtttgctgtgtttgatgaggggaaatcatggcactcagagaccaagaacagcctcatgcaggatagggatgctgccagtgccagggcttggcccaagatgcacactgtgaatggctatgtgaatagaagcctgcctgggctgataggctgtcacagaaaatctgtgtactggcatgtgattggcatgggcaccacacctgaggtgcactccattttcctggagggccacaccttccttgtgagaaaccacagacaagcttccctggagatcagcccaatcacctttctgactgctcaaaccctcctgatggatctgggccagttcctgctgttctgtcatatctcctcacaccagcatgatggaatggaagcttatgtcaaggtggactcctgcccagaggaaccacagctcagaatgaagaacaatgaggaggctgaggactatgatgatgacctgacagactctgaaatggatgtggtcagatttgatgatgacaacagcccttcattcatccaaatcagatctgtggccaagaagcatcccaagacctgggtgcactacatagctgctgaggaggaggactgggactatgcccctctggtcctggcccctgatgacagaagctataaaagccagtacctgaataatggcccccagagaattggcagaaagtacaagaaagtcagattcatggcttacactgatgagaccttcaaaaccagggaagccatccagcatgagtcaggcatcctgggccccctgctgtatggggaggttggagataccctgctgattatcttcaaaaaccaggcaagcaggccctacaatatctaccctcatggcatcactgatgtcaggccactgtattccagaagactgcctaagggggtgaagcacctgaaggacttcccaatcctgccaggggagattttcaaatacaagtggacagtgactgtggaggatggaccaaccaagtcagatcctagatgtctgaccagatactactccagctttgtgaacatggagagagacctggcctctggcctgattggccctctgctgatctgctataaagagtcagtggaccagagaggcaaccagatcatgagtgacaaaagaaatgtgatcttgttctcagtgtttgatgagaatagatcttggtacctcacagaaaacatccagaggttcctgcccaatccagctggggtgcagctggaagatccagaattccaggccagcaacatcatgcatagcatcaatggttatgtctttgacagcctgcagctgtcagtgtgtctgcatgaagttgcttactggtatattctgtccattggagcccagacagacttcctgtctgtcttcttctctggctacacctttaaacacaagtgggtgtatgaggacaccctgaccctgttccctttctctggggaaacagtgttcatgtccatggaaaaccctggactgtggatcctgggctgccataacagtgacttcagaaacagaggcatgacagccctgctcaaggtgtccagctgtgataagaacacaggagactactatgaggatagctatgaggacatcagtgcttacctgctggtggaaatgaaaaaggaggattttgacatctatgatgaggatgagaaccagagccctagaagcttccagaaaaagactagacactacttcattgctgcagtggagagactctgggattatggcatgagctccagcccccatgtgctgagaaatagagctcagagtggcagtgtgccacagttcaagaaggtggtgtttcaggagttcactgatggctccttcacacaaccactttacagaggagaactgaatgagcacctgggcctcctgggcccctacatcagggctgaagtggaggataacattatggtcacatttaggaatcaggcttccagaccctactccttttattcctcactcatttcctatgaggaggaccagaggcagggagctgagcccagaaaaaattttgtgaaacccaatgaaaccaagacctacttctggaaggtgcagcaccatatggcccctaccaaggatgaatttgactgcaaggcttgggcttacttttctgatgtggaccttgagaaagatgtgcattcaggcctcattgggccactgctggtgtgccacaccaatacactgaaccctgctcatgggagacaggtcacagtgcaggagtttgcactcttctttaccatctttgatgagaccaagtcctggtatttcactgagaacatggagaggaactgcagggccccttgtaacatccagatggaggatcccaccttcaaggaaaactacagattccatgccatcaatggctacatcatggacaccctgccaggcctggtgatggcccaggaccagaggatcaggtggtacctcctgtctatgggcagcaatgaaaatatccacagcattcacttctctggacatgtgtttactgtgaggaagaaggaggaatacaagatggctctgtacaacctctaccctggggtgtttgaaacagtggagatgctgccctccaaggctggcatctggagagtggaatgtctgattggggagcatctgcatgctggcatgagcacactgttcctggtgtattccaacaagtgccagaccccactgggcatggcctcaggacatatcagggacttccagatcactgctagtggacaatatggacagtgggcacccaagctggccagactgcactactcaggctccatcaatgcctggagtaccaaggagcccttcagctggatcaaggtggacctgctggcccccatgattatacatggcatcaagacccagggagctagacagaagttcagctccctgtacatctcccaattcatcatcatgtactctctggatggcaagaaatggcagacctacagaggcaatagcactggcaccctgatggtgttttttggaaatgttgactcttctggcatcaagcacaacatcttcaacccccccatcattgccagatatatcaggctccaccccacccactactccataaggagcaccctgagaatggagctgatgggctgtgacctgaattcctgctccatgcccctgggcatggaatccaaggcaatctctgatgcacagatcacagcctcctcctacttcaccaacatgtttgcaacctggagcccctccaaggccagactgcacctgcagggcaggtccaatgcttggagaccacaagtgaacaacccaaaggagtggctgcaggtggacttccagaagaccatgaaagtgactggagtgaccacccagggagtgaaatccctgctcactagcatgtatgtgaaggaattcctgatcagtagctctcaagatggccaccagtggaccctgttcttccagaatggcaaggtgaaggtgtttcagggcaaccaggattccttcacccctgtggtgaatagcctggatcccccactgctgaccagatacctgagaatccacccccagtcctgggttcaccagattgccctgagaatggaggtgctgggctgtgaggcccaggacctgtac

SEQ ID NO: 76 - DNA, 4314 bp, Artificial Sequence
  Codop19 (Co19) nucleotide sequence encoding FVIII 26-SQ
gctactagaagatattatcttggggcagtggagctgagctgggactacatgcagtctgacctgggagaactgcctgtggatgccagatttccccctcgagtgcccaagagcttcccctttaacacctcagtggtgtacaagaagaccctgtttgtggagtttacagaccatctcttcaacattgctaagcccagacctccctggatgggcctgctgggccctaccatccaagctgaagtgtatgacactgttgtgatcacactcaagaacatggcctcccatcctgtgtccctgcatgcagtgggagtctcctactggaaggcctcagaaggagcagagtatgatgaccagaccagccagagagagaaggaggatgacaaggtgtttcctggagggagccacacctatgtgtggcaggtgctgaaggagaatggacctatggccagtgaccctctgtgtcttacctattcctacctgtcacatgtggatctggtgaaggacctgaacagtggcctgattggggctctgctggtttgcagagaaggcagcttggccaaggagaagacccaaaccctgcacaagttcatcctgctgtttgctgtgtttgatgaggggaaatcatggcactcagagaccaagaacagcctcatgcaggatagggatgctgccagtgccagggcttggcccaagatgcacactgtgaatggctatgtgaatagaagcctgcctgggctgataggctgtcacagaaaatctgtgtactggcatgtgattggcatgggcaccacacctgaggtgcactccattttcctggagggccacaccttccttgtgagaaaccacagacaagcttccctggagatcagcccaatcacctttctgactgctcaaaccctcctgatggatctgggccagttcctgctgttctgtcatatctcctcacaccagcatgatggaatggaagcttatgtcaaggtggactcctgcccagaggaaccacagctcagaatgaagaacaatgaggaggctgaggactatgatgatgacctgacagactctgaaatggatgtggtcagatttgatgatgacaacagcccttcattcatccaaatcagatctgtggccaagaagcatcccaagacctgggtgcactacatagctgctgaggaggaggactgggactatgcccctctggtcctggcccctgatgacagaagctataaaagccagtacctgaataatggcccccagagaattggcagaaagtacaagaaagtcagattcatggcttacactgatgagaccttcaaaaccagggaagccatccagcatgagtcaggcatcctgggccccctgctgtatggggaggttggagataccctgctgattatcttcaaaaaccaggcaagcaggccctacaatatctaccctcatggcatcactgatgtcaggccactgtattccagaagactgcctaagggggtgaagcacctgaaggacttcccaatcctgccaggggagattttcaaatacaagtggacagtgactgtggaggatggaccaaccaagtcagatcctagatgtctgaccagatactactccagctttgtgaacatggagagagacctggcctctggcctgattggccctctgctgatctgctataaagagtcagtggaccagagaggcaaccagatcatgagtgacaaaagaaatgtgatcttgttctcagtgtttgatgagaatagatcttggtacctcacagaaaacatccagaggttcctgcccaatccagctggggtgcagctggaagatccagaattccaggccagcaacatcatgcatagcatcaatggttatgtctttgacagcctgcagctgtcagtgtgtctgcatgaagttgcttactggtatattctgtccattggagcccagacagacttcctgtctgtcttcttctctggctacacctttaaacacaagtgggtgtatgaggacaccctgaccctgttccctttctctggggaaacagtgttcatgtccatggaaaaccctggactgtggatcctgggctgccataacagtgacttcagaaacagaggcatgacagccctgctcaaggtgtccagctgtgataagaacacaggagactactatgaggatagctatgaggacatcagtgcttacctgctgagcaagaataatgccattgaacccaggtcattttcccaaaatccccctgtgctgaaaaggcaccagagggagatcacgcgtaccaccctgcagagtgaccaggaggaaattgattatgatgacaccatctctgtggaaatgaaaaaggaggattttgacatctatgatgaggatgagaaccagagccctagaagcttccagaaaaagactagacactacttcattgctgcagtggagagactctgggattatggcatgagctccagcccccatgtgctgagaaatagagctcagagtggcagtgtgccacagttcaagaaggtggtgtttcaggagttcactgatggctccttcacacaaccactttacagaggagaactgaatgagcacctgggcctcctgggcccctacatcagggctgaagtggaggataacattatggtcacatttaggaatcaggcttccagaccctactccttttattcctcactcatttcctatgaggaggaccagaggcagggagctgagcccagaaaaaattttgtgaaacccaatgaaaccaagacctacttctggaaggtgcagcaccatatggcccctaccaaggatgaatttgactgcaaggcttgggcttacttttctgatgtggaccttgagaaagatgtgcattcaggcctcattgggccactgctggtgtgccacaccaatacactgaaccctgctcatgggagacaggtcacagtgcaggagtttgcactcttctttaccatctttgatgagaccaagtcctggtatttcactgagaacatggagaggaactgcagggccccttgtaacatccagatggaggatcccaccttcaaggaaaactacagattccatgccatcaatggctacatcatggacaccctgccaggcctggtgatggcccaggaccagaggatcaggtggtacctcctgtctatgggcagcaatgaaaatatccacagcattcacttctctggacatgtgtttactgtgaggaagaaggaggaatacaagatggctctgtacaacctctaccctggggtgtttgaaacagtggagatgctgccctccaaggctggcatctggagagtggaatgtctgattggggagcatctgcatgctggcatgagcacactgttcctggtgtattccaacaagtgccagaccccactgggcatggcctcaggacatatcagggacttccagatcactgctagtggacaatatggacagtgggcacccaagctggccagactgcactactcaggctccatcaatgcctggagtaccaaggagcccttcagctggatcaaggtggacctgctggcccccatgattatacatggcatcaagacccagggagctagacagaagttcagctccctgtacatctcccaattcatcatcatgtactctctggatggcaagaaatggcagacctacagaggcaatagcactggcaccctgatggtgttttttggaaatgttgactcttctggcatcaagcacaacatcttcaacccccccatcattgccagatatatcaggctccaccccacccactactccataaggagcaccctgagaatggagctgatgggctgtgacctgaattcctgctccatgcccctgggcatggaatccaaggcaatctctgatgcacagatcacagcctcctcctacttcaccaacatgtttgcaacctggagcccctccaaggccagactgcacctgcagggcaggtccaatgcttggagaccacaagtgaacaacccaaaggagtggctgcaggtggacttccagaagaccatgaaagtgactggagtgaccacccagggagtgaaatccctgctcactagcatgtatgtgaaggaattcctgatcagtagctctcaagatggccaccagtggaccctgttcttccagaatggcaaggtgaaggtgtttcagggcaaccaggattccttcacccctgtggtgaatagcctggatcccccactgctgaccagatacctgagaatccacccccagtcctgggttcaccagattgccctgagaatggaggtgctgggctgtgaggcccaggacctgtac

SEQ ID NO: 77 - protein, 1394 aa, Artificial Sequence
  FVIII 26-96-106 amino acid sequence
ATRRYYLGAVELSWDYMQSDLGELPVDARFPPRVPKSFPFNTSVVYKKTLFVEFTDHLFNIAKPRPPWMGLLGPTIQAEVYDTVVITLKNMASHPVSLHAVGVSYWKASEGAEYDDQTSQREKEDDKVFPGGSHTYVWQVLKENGPMASDPLCLTYSYLSHVDLVKDLNSGLIGALLVCREGSLAKEKTQTLHKFILLFAVFDEGKSWHSETKNSLMQDRDAASARAWPKMHTVNGYVNRSLPGLIGCHRKSVYWHVIGMGTTPEVHSIFLEGHTFLVRNHRQASLEISPITFLTAQTLLMDLGQFLLFCHISSHQHDGMEAYVKVDSCPEEPQLRMKNNEEAEDYDDDLTDSEMDVVRFDDDNSPSFIQIRSVAKKHPKTWVHYIAAEEEDWDYAPLVLAPDDRSYKSQYLNNGPQRIGRKYKKVRFMAYTDETFKTREAIQHESGILGPLLYGEVGDTLLIIFKNQASRPYNIYPHGITDVRPLYSRRLPKGVKHLKDFPILPGEIFKYKWTVTVEDGPTKSDPRCLTRYYSSFVNMERDLASGLIGPLLICYKESVDQRGNQIMSDKRNVILFSVFDENRSWYLTENIQRFLPNPAGVQLEDPEFQASNIMHSINGYVFDSLQLSVCLHEVAYWYILSIGAQTDFLSVFFSGYTFKHKWVYEDTLTLFPFSGETVFMSMENPGLWILGCHNSDFRNRGMTALLKVSSCDKNTGDYYEDSYEDISAYLLVEMKKEDFDIYDEDENQSPRSFQKKTRHYFIAAVERLWDYGMSSSPHVLRNRAQSGSVPQFKKVVFQEFTDGSFTQPLYRGELNEHLGLLGPYIRAEVEDNIMVTFRNQASRPYSFYSSLISYEEDQRQGAEPRKNFVKPNETKTYFWKVQHHMAPTKDEFDCKAWAYFSDVDLEKDVHSGLIGPLLVCHTNTLNPAHGRQVTVQEFALFFTIFDETKSWYFTENMERNCRAPCNIQMEDPTFKENYRFHAINGYIMDTLPGLVMAQDQRIRWYLLSMGSNENIHSIHFSGHVFTVRKKEEYKMALYNLYPGVFETVEMLPSKAGIWRVECLIGEHLHAGMSTLFLVYSNKCQTPLGMASGHIRDFQITASGQYGQWAPKLARLHYSGSINAWSTKEPFSWIKVDLLAPMIIHGIKTQGARQKFSSLYISQFIIMYSLDGKKWQTYRGNSTGTLMVFFGNVDSSGIKHNIFNPPIIARYIRLHPTHYSIRSTLRMELMGCDLNSCSMPLGMESKAISDAQITASSYFTNMFATWSPSKARLHLQGRSNAWRPQVNNPKEWLQVDFQKTMKVTGVTTQGVKSLLTSMYVKEFLISSSQDGHQWTLFFQNGKVKVFQGNQDSFTPVVNSLDPPLLTRYLRIHPQSWVHQIALRMEVLGCEAQDLY

SEQ ID NO: 78 - protein, 1438 aa, Artificial Sequence
  FVIII 26-SQ amino acid sequence
ATRRYYLGAVELSWDYMQSDLGELPVDARFPPRVPKSFPFNTSVVYKKTLFVEFTDHLFNIAKPRPPWMGLLGPTIQAEVYDTVVITLKNMASHPVSLHAVGVSYWKASEGAEYDDQTSQREKEDDKVFPGGSHTYVWQVLKENGPMASDPLCLTYSYLSHVDLVKDLNSGLIGALLVCREGSLAKEKTQTLHKFILLFAVFDEGKSWHSETKNSLMQDRDAASARAWPKMHTVNGYVNRSLPGLIGCHRKSVYWHVIGMGTTPEVHSIFLEGHTFLVRNHRQASLEISPITFLTAQTLLMDLGQFLLFCHISSHQHDGMEAYVKVDSCPEEPQLRMKNNEEAEDYDDDLTDSEMDVVRFDDDNSPSFIQIRSVAKKHPKTWVHYIAAEEEDWDYAPLVLAPDDRSYKSQYLNNGPQRIGRKYKKVRFMAYTDETFKTREAIQHESGILGPLLYGEVGDTLLIIFKNQASRPYNIYPHGITDVRPLYSRRLPKGVKHLKDFPILPGEIFKYKWTVTVEDGPTKSDPRCLTRYYSSFVNMERDLASGLIGPLLICYKESVDQRGNQIMSDKRNVILFSVFDENRSWYLTENIQRFLPNPAGVQLEDPEFQASNIMHSINGYVFDSLQLSVCLHEVAYWYILSIGAQTDFLSVFFSGYTFKHKWVYEDTLTLFPFSGETVFMSMENPGLWILGCHNSDFRNRGMTALLKVSSCDKNTGDYYEDSYEDISAYLLSKNNAIEPRSFSQNPPVLKRHQREITRTTLQSDQEEIDYDDTISVEMKKEDFDIYDEDENQSPRSFQKKTRHYFIAAVERLWDYGMSSSPHVLRNRAQSGSVPQFKKVVFQEFTDGSFTQPLYRGELNEHLGLLGPYIRAEVEDNIMVTFRNQASRPYSFYSSLISYEEDQRQGAEPRKNFVKPNETKTYFWKVQHHMAPTKDEFDCKAWAYFSDVDLEKDVHSGLIGPLLVCHTNTLNPAHGRQVTVQEFALFFTIFDETKSWYFTENMERNCRAPCNIQMEDPTFKENYRFHAINGYIMDTLPGLVMAQDQRIRWYLLSMGSNENIHSIHFSGHVFTVRKKEEYKMALYNLYPGVFETVEMLPSKAGIWRVECLIGEHLHAGMSTLFLVYSNKCQTPLGMASGHIRDFQITASGQYGQWAPKLARLHYSGSINAWSTKEPFSWIKVDLLAPMIIHGIKTQGARQKFSSLYISQFIIMYSLDGKKWQTYRGNSTGTLMVFFGNVDSSGIKHNIFNPPIIARYIRLHPTHYSIRSTLRMELMGCDLNSCSMPLGMESKAISDAQITASSYFTNMFATWSPSKARLHLQGRSNAWRPQVNNPKEWLQVDFQKTMKVTGVTTQGVKSLLTSMYVKEFLISSSQDGHQWTLFFQNGKVKVFQGNQDSFTPVVNSLDPPLLTRYLRIHPQSWVHQIALRMEVLGCEAQDLY

SEQ ID NO: 79 - protein, 1394 aa, Artificial Sequence
  FVIII 65-96-106 amino acid sequence
ATRRYYLGAVELSWDYMQSDLGELPVDARFPPRVPKSFPFNTSVVYKKTLFVEFTDHLFNIAKPRPPWMGLLGPTIQAEVYDTVVITLKNMASHPVSLHAVGVSYWKASEGAEYDDQTSQREKEDDKVFPGGSHTYVWQVLKENGPMASDPLCLTYSYLSHVDLVKDLNSGLIGALLVCREGSLAKEKTQTLHKFILLFAVFDEGKSWHSETKNSLMQDRDAASARAWPKMHTVNGYVNRSLPGLIGCHRKSVYWHVIGMGTTPEVHSIFLEGHTFLVRNHRQASLEISPITFLTAQTLLMDLGQFLLFCHISSHQHDGMEAYVKVDSCPEEPQLRMKNNEEAEDYDDDLTDSEMDVVRFDDDNSPSFIQIRSVAKKHPKTWVHYIAAEEEDWDYAPLVLAPDDRSYKSQYLNNGPQRIGRKYKKVRFMAYTDETFKTREAIQHESGILGPLLYGEVGDTLLIIFKNQASRPYNIYPHGITDVRPLYSRRLPKGVKHLKDFPILPGEIFKYKWTVTVEDGPTKSDPRCLTRYYSSFVNMERDLASGLIGPLLICYKESVDQRGNQIMSDKRNVILFSVFDENRSWYLTENIQRFLPNPAGVQLEDPEFQASNIMHSINGYVFDSLQLSVCLHEVAYWYILSIGAQTDFLSVFFSGYTFKHKMVYEDTLTLFPFSGETVFMSMENPGLWILGCWNSDFRNRGMTALLKVSSCDKNTGDYYEDSYEDISAYLLVEMKKEDFDIYDEDENQSPRSFQKKTRHYFIAAVERLWDYGMSSSPHVLRNRAQSGSVPQFKKVVFQEFTDGSFTQPLYRGELNEHLGLLGPYIRAEVEDNIMVTFRNQASRPYSFYSSLISYEEDQRQGAEPRKNFVKPNETKTYFWKVQHHMAPTKDEFDCKAWAYFSDVDLEKDVHSGLIGPLLVCHTNTLNPAHGRQVTVQEFALFFTIFDETKSWYFTENMERNCRAPCNIQMEDPTFKENYRFHAINGYIMDTLPGLVMAQDQRIRWYLLSMGSNENIHSIHFSGHVFTVRKKEEYKMALYNLYPGVFETVEMLPSKAGIWRVECLIGEHLHAGMSTLFLVYSNKCQTPLGMASGHIRDFQITASGQYGQWAPKLARLHYSGSINAWSTKEPFSWIKVDLLAPMIIHGIKTQGARQKFSSLYISQFIIMYSLDGKKWQTYRGNSTGTLMVFFGNVDSSGIKHNIFNPPIIARYIRLHPTHYSIRSTLRMELMGCDLNSCSMPLGMESKAISDAQITASSYFTNMFATWSPSKARLHLQGRSNAWRPQVNNPKEWLQVDFQKTMKVTGVTTQGVKSLLTSMYVKEFLISSSQDGHQWTLFFQNGKVKVFQGNQDSFTPVVNSLDPPLLTRYLRIHPQSWVHQIALRMEVLGCEAQDLY

SEQ ID NO: 80 - protein, 1394 aa, Artificial Sequence
  FVIII 26-65-96-106 amino acid sequence
ATRRYYLGAVELSWDYMQSDLGELPVDARFPPRVPKSFPFNTSVVYKKTLFVEFTDHLFNIAKPRPPWMGLLGPTIQAEVYDTVVITLKNMASHPVSLHAVGVSYWKASEGAEYDDQTSQREKEDDKVFPGGSHTYVWQVLKENGPMASDPLCLTYSYLSHVDLVKDLNSGLIGALLVCREGSLAKEKTQTLHKFILLFAVFDEGKSWHSETKNSLMQDRDAASARAWPKMHTVNGYVNRSLPGLIGCHRKSVYWHVIGMGTTPEVHSIFLEGHTFLVRNHRQASLEISPITFLTAQTLLMDLGQFLLFCHISSHQHDGMEAYVKVDSCPEEPQLRMKNNEEAEDYDDDLTDSEMDVVRFDDDNSPSFIQIRSVAKKHPKTWVHYIAAEEEDWDYAPLVLAPDDRSYKSQYLNNGPQRIGRKYKKVRFMAYTDETFKTREAIQHESGILGPLLYGEVGDTLLIIFKNQASRPYNIYPHGITDVRPLYSRRLPKGVKHLKDFPILPGEIFKYKWTVTVEDGPTKSDPRCLTRYYSSFVNMERDLASGLIGPLLICYKESVDQRGNQIMSDKRNVILFSVFDENRSWYLTENIQRFLPNPAGVQLEDPEFQASNIMHSINGYVFDSLQLSVCLHEVAYWYILSIGAQTDFLSVFFSGYTFKHKWVYEDTLTLFPFSGETVFMSMENPGLWILGCWNSDFRNRGMTALLKVSSCDKNTGDYYEDSYEDISAYLLVEMKKEDFDIYDEDENQSPRSFQKKTRHYFIAAVERLWDYGMSSSPHVLRNRAQSGSVPQFKKVVFQEFTDGSFTQPLYRGELNEHLGLLGPYIRAEVEDNIMVTFRNQASRPYSFYSSLISYEEDQRQGAEPRKNFVKPNETKTYFWKVQHHMAPTKDEFDCKAWAYFSDVDLEKDVHSGLIGPLLVCHTNTLNPAHGRQVTVQEFALFFTIFDETKSWYFTENMERNCRAPCNIQMEDPTFKENYRFHAINGYIMDTLPGLVMAQDQRIRWYLLSMGSNENIHSIHFSGHVFTVRKKEEYKMALYNLYPGVFETVEMLPSKAGIWRVECLIGEHLHAGMSTLFLVYSNKCQTPLGMASGHIRDFQITASGQYGQWAPKLARLHYSGSINAWSTKEPFSWIKVDLLAPMIIHGIKTQGARQKFSSLYISQFIIMYSLDGKKWQTYRGNSTGTLMVFFGNVDSSGIKHNIFNPPIIARYIRLHPTHYSIRSTLRMELMGCDLNSCSMPLGMESKAISDAQITASSYFTNMFATWSPSKARLHLQGRSNAWRPQVNNPKEWLQVDFQKTMKVTGVTTQGVKSLLTSMYVKEFLISSSQDGHQWTLFFQNGKVKVFQGNQDSFTPVVNSLDPPLLTRYLRIHPQSWVHQIALRMEVLGCEAQDLY

SEQ ID NO: 81 - protein, 1394 aa, Artificial Sequence
  FVIII 12SS-96-106 amino acid sequence
ATRRYYLGAVELSWDYMQSDLGELPVDARFPPRVPKSFPFNTSVVYKKTLFVEFTDHLFNIAKPRPPWMGLLGPTIQAEVYDTVVITLKNMASHPVSLHAVGVSYWKASEGAEYDDQTSQREKEDDKVFPGGSHTYVWQVLKENGPMASDPLCLTYSYLSHVDLVKDLNSGLIGALLVCREGSLAKEKTQTLHKFILLFAVFDEGKSWHSETKNSLMQDRDAASARAWPKMHTVNGYVNRSLPGLIGCHRKSVYWHVIGMGTTPEVHSIFLEGHTFLVRNHRQASLEISPITFLTAQTLLMDLGQFLLFCHISSHQHDGMEAYVKVDSCPEEPQLRMKNNEEAEDYDDDLTDSEMDVVRFDDDNSPSFIQIRSVAKKHPKTWVHYIAAEEEDWDYAPLVLAPDDRSYKSQYLNNGPQRIGRKYKKVRFMAYTDETFKTREAIQHESGILGPLLYGEVGDTLLIIFKNQASRPYNIYPHGITDVRPLYSRRLPKGVKHLKDFPILPGEIFKYKWTVTVEDGPTKSDPRCLTRYYSSFVNMERDLASGLIGPLLICYKESVDQRGNQIMSDKRNVILFSVFDENRSWYLTENIQRFLPNPAGVQLEDPEFQASNIMHSINGYVFDSLQLSVCLHEVAYWYILSIGAQTDFLSVFFSGYTFKHKMVYEDTLTLFPFSGETVFMSMENPGCWILGCHNSDFRNRGMTALLKVSSCDKNTGDYYEDSYEDISAYLLVEMKKEDFDIYDEDENQSPRSFQKKTRHYFIAAVERLWDYGMSSSPHVLRNRAQSGSVPQFKKVVFQEFTDGSFTQPLYRGELNEHLGLLGPYIRAEVEDNIMVTFRNQASRPYSFYSSLISYEEDQRQGCEPRKNFVKPNETKTYFWKVQHHMAPTKDEFDCKAWAYFSDVDLEKDVHSGLIGPLLVCHTNTLNPAHGRQVTVQEFALFFTIFDETKSWYFTENMERNCRAPCNIQMEDPTFKENYRFHAINGYIMDTLPGLVMAQDQRIRWYLLSMGSNENIHSIHFSGHVFTVRKKEEYKMALYNLYPGVFETVEMLPSKAGIWRVECLIGEHLHAGMSTLFLVYSNKCQTPLGMASGHIRDFQITASGQYGQWAPKLARLHYSGSINAWSTKEPFSWIKVDLLAPMIIHGIKTQGARQKFSSLYISQFIIMYSLDGKKWQTYRGNSTGTLMVFFGNVDSSGIKHNIFNPPIIARYIRLHPTHYSIRSTLRMELMGCDLNSCSMPLGMESKAISDAQITASSYFTNMFATWSPSKARLHLQGRSNAWRPQVNNPKEWLQVDFQKTMKVTGVTTQGVKSLLTSMYVKEFLISSSQDGHQWTLFFQNGKVKVFQGNQDSFTPVVNSLDPPLLTRYLRIHPQSWVHQIALRMEVLGCEAQDLY

SEQ ID NO: 82 - protein, 1394 aa, Artificial Sequence
  FVIII 28SS-96-106 amino acid sequence
ATRRYYLGAVELSWDYMQSDLGELPVDARFPPRVPKSFPFNTSVVYKKTLFVEFTDHLFNIAKPRPPWMGLLGPTIQAEVYDTVVITLKNMASHPVSLHAVGVSYWKASEGAEYDDQTSQREKEDDKVFPGGSHTYVWQVLKENGPMASDPLCLTYSYLSHVDLVKDLNSGLIGALLVCREGSLAKEKTQTLHKFILLFAVFDEGKSWHSETKNSLMQDRDAASARAWPKMHTVNGYVNRSLPGLIGCHRKSVYWHVIGMGTTPEVHSIFLEGHTFLVRNHRQASLEISPITFLTAQTLLMDLGQFLLFCHISSHQHDGMEAYVKVDSCPEEPQLRMKNNEEAEDYDDDLTDSEMDVVRFDDDNSPSFIQIRSVAKKHPKTWVHYIAAEEEDWDYAPLVLAPDDRSYKSQYLNNGPQRIGRKYKKVRFMAYTDETFKTREAIQHESGILGPLLYGEVGDTLLIIFKNQASRPYNIYPHGITDVRPLYSRRLPKGVKHLKDFPILPGEIFKYKWTVTVEDGPTKSDPRCLTRYYSSFVNMERDLASGLIGPLLICYKESVDQRGNQIMSDKRNVILFSVFDENRSWYLTENIQRFLPNPAGVQLEDPEFQASNIMHSINGYVFDSLQLSVCLHEVAYWYILSIGAQTDFLSVFFSGYTFKHKMVYEDTLTLFPFSGETVFMSMECPGLWILGCHNSDFRNRGMTALLKVSSCDKNTGDYYEDSYEDISAYLLVEMKKEDFDIYDEDENQSPRSFQKKTRHYFIAAVERLWDYGMSSSPHVLRNRAQSGSVPQFKKVVFQEFTDGSFTQPLYRGELNEHLGLLGPYIRAEVEDNIMVTFRNQASRPYSFYSSLICYEEDQRQGAEPRKNFVKPNETKTYFWKVQHHMAPTKDEFDCKAWAYFSDVDLEKDVHSGLIGPLLVCHTNTLNPAHGRQVTVQEFALFFTIFDETKSWYFTENMERNCRAPCNIQMEDPTFKENYRFHAINGYIMDTLPGLVMAQDQRIRWYLLSMGSNENIHSIHFSGHVFTVRKKEEYKMALYNLYPGVFETVEMLPSKAGIWRVECLIGEHLHAGMSTLFLVYSNKCQTPLGMASGHIRDFQITASGQYGQWAPKLARLHYSGSINAWSTKEPFSWIKVDLLAPMIIHGIKTQGARQKFSSLYISQFIIMYSLDGKKWQTYRGNSTGTLMVFFGNVDSSGIKHNIFNPPIIARYIRLHPTHYSIRSTLRMELMGCDLNSCSMPLGMESKAISDAQITASSYFTNMFATWSPSKARLHLQGRSNAWRPQVNNPKEWLQVDFQKTMKVTGVTTQGVKSLLTSMYVKEFLISSSQDGHQWTLFFQNGKVKVFQGNQDSFTPVVNSLDPPLLTRYLRIHPQSWVHQIALRMEVLGCEAQDLY

SEQ ID NO: 83 - protein, 1394 aa, Artificial Sequence
  FVIII 31SS-96-106 amino acid sequence
ATRRYYLGAVELSWDYMQSDLGELPVDARFPPRVPKSFPFNTSVVYKKTLFVEFTDHLFNIAKPRPPWMGLLGPTIQAEVYDTVVITLKNMASHPVSLHAVGVSYWKASEGAEYDDQTSQREKEDDKVFPGGSHTYVWQVLKENGPMASDPLCLTYSYLSHVDLVKDLNSGLIGALLVCREGSLAKEKTQTLHKFILLFAVFDEGKSWHSETKNSLMQDRDAASARAWPKMHTVNGYVNRSLPGLIGCHRKSVYWHVIGMGTTPEVHSIFLEGHTFLVRNHRQASLEISPITFLTAQTLLMDLGQFLLFCHISSHQHDGMEAYVKVDSCPEEPQLRMKNNEEAEDYDDDLTDSEMDVVRFDDDNSPSFIQIRSVAKKHPKTWVHYIAAEEEDWDYAPLVLAPDDRSYKSQYLNNGPQRIGRKYKKVRFMAYTDETFKTREAIQHESGILGPLLYGEVGDTLLIIFKNQASRPYNIYPHGITDVRPLYSRRLPKGVKHLKDFPILPGEIFKYKWTVTVEDGPTKSDPRCLTRYYSSFVNMERDLASGLIGPLLICYKESVDQRGNQIMSDKRNVILFSVFDENRSWYLTENIQRFLPNPAGVQLEDPEFQASNIMHSINGYVFDSLQLSVCLHEVAYWYILSIGAQTDFLSVFFSGYTFKHKMVYEDTLTLFPFSGETVFMSMENPGLWILGCHNCDFRNRGMTALLKVSSCDKNTGDYYEDSYEDISAYLLVEMKKEDFDIYDEDENQSPRSFQKKTRHYFIAAVERLWDYGMSSSPHVLRNRAQSGSVPQFKKVVFQEFTDGSFTQPLYRGELNEHLGLLGPYIRAEVEDNIMVTFRNQASRPYSFYSSLISYEEDQRQGAEPRKNFVKPNETKTYFWKVQHHMAPTKDEFDCKAWAYFSDVDLCKDVHSGLIGPLLVCHTNTLNPAHGRQVTVQEFALFFTIFDETKSWYFTENMERNCRAPCNIQMEDPTFKENYRFHAINGYIMDTLPGLVMAQDQRIRWYLLSMGSNENIHSIHFSGHVFTVRKKEEYKMALYNLYPGVFETVEMLPSKAGIWRVECLIGEHLHAGMSTLFLVYSNKCQTPLGMASGHIRDFQITASGQYGQWAPKLARLHYSGSINAWSTKEPFSWIKVDLLAPMIIHGIKTQGARQKFSSLYISQFIIMYSLDGKKWQTYRGNSTGTLMVFFGNVDSSGIKHNIFNPPIIARYIRLHPTHYSIRSTLRMELMGCDLNSCSMPLGMESKAISDAQITASSYFTNMFATWSPSKARLHLQGRSNAWRPQVNNPKEWLQVDFQKTMKVTGVTTQGVKSLLTSMYVKEFLISSSQDGHQWTLFFQNGKVKVFQGNQDSFTPVVNSLDPPLLTRYLRIHPQSWVHQIALRMEVLGCEAQDLY

SEQ ID NO: 84 - protein, 1438 aa, Artificial Sequence
  FVIII 65-SQ amino acid sequence
ATRRYYLGAVELSWDYMQSDLGELPVDARFPPRVPKSFPFNTSVVYKKTLFVEFTDHLFNIAKPRPPWMGLLGPTIQAEVYDTVVITLKNMASHPVSLHAVGVSYWKASEGAEYDDQTSQREKEDDKVFPGGSHTYVWQVLKENGPMASDPLCLTYSYLSHVDLVKDLNSGLIGALLVCREGSLAKEKTQTLHKFILLFAVFDEGKSWHSETKNSLMQDRDAASARAWPKMHTVNGYVNRSLPGLIGCHRKSVYWHVIGMGTTPEVHSIFLEGHTFLVRNHRQASLEISPITFLTAQTLLMDLGQFLLFCHISSHQHDGMEAYVKVDSCPEEPQLRMKNNEEAEDYDDDLTDSEMDVVRFDDDNSPSFIQIRSVAKKHPKTWVHYIAAEEEDWDYAPLVLAPDDRSYKSQYLNNGPQRIGRKYKKVRFMAYTDETFKTREAIQHESGILGPLLYGEVGDTLLIIFKNQASRPYNIYPHGITDVRPLYSRRLPKGVKHLKDFPILPGEIFKYKWTVTVEDGPTKSDPRCLTRYYSSFVNMERDLASGLIGPLLICYKESVDQRGNQIMSDKRNVILFSVFDENRSWYLTENIQRFLPNPAGVQLEDPEFQASNIMHSINGYVFDSLQLSVCLHEVAYWYILSIGAQTDFLSVFFSGYTFKHKMVYEDTLTLFPFSGETVFMSMENPGLWILGCWNSDFRNRGMTALLKVSSCDKNTGDYYEDSYEDISAYLLSKNNAIEPRSFSQNPPVLKRHQREITRTTLQSDQEEIDYDDTISVEMKKEDFDIYDEDENQSPRSFQKKTRHYFIAAVERLWDYGMSSSPHVLRNRAQSGSVPQFKKVVFQEFTDGSFTQPLYRGELNEHLGLLGPYIRAEVEDNIMVTFRNQASRPYSFYSSLISYEEDQRQGAEPRKNFVKPNETKTYFWKVQHHMAPTKDEFDCKAWAYFSDVDLEKDVHSGLIGPLLVCHTNTLNPAHGRQVTVQEFALFFTIFDETKSWYFTENMERNCRAPCNIQMEDPTFKENYRFHAINGYIMDTLPGLVMAQDQRIRWYLLSMGSNENIHSIHFSGHVFTVRKKEEYKMALYNLYPGVFETVEMLPSKAGIWRVECLIGEHLHAGMSTLFLVYSNKCQTPLGMASGHIRDFQITASGQYGQWAPKLARLHYSGSINAWSTKEPFSWIKVDLLAPMIIHGIKTQGARQKFSSLYISQFIIMYSLDGKKWQTYRGNSTGTLMVFFGNVDSSGIKHNIFNPPIIARYIRLHPTHYSIRSTLRMELMGCDLNSCSMPLGMESKAISDAQITASSYFTNMFATWSPSKARLHLQGRSNAWRPQVNNPKEWLQVDFQKTMKVTGVTTQGVKSLLTSMYVKEFLISSSQDGHQWTLFFQNGKVKVFQGNQDSFTPVVNSLDPPLLTRYLRIHPQSWVHQIALRMEVLGCEAQDLY

SEQ ID NO: 85 - protein, 1438 aa, Artificial Sequence
  FVIII 26-65-SQ amino acid sequence
ATRRYYLGAVELSWDYMQSDLGELPVDARFPPRVPKSFPFNTSVVYKKTLFVEFTDHLFNIAKPRPPWMGLLGPTIQAEVYDTVVITLKNMASHPVSLHAVGVSYWKASEGAEYDDQTSQREKEDDKVFPGGSHTYVWQVLKENGPMASDPLCLTYSYLSHVDLVKDLNSGLIGALLVCREGSLAKEKTQTLHKFILLFAVFDEGKSWHSETKNSLMQDRDAASARAWPKMHTVNGYVNRSLPGLIGCHRKSVYWHVIGMGTTPEVHSIFLEGHTFLVRNHRQASLEISPITFLTAQTLLMDLGQFLLFCHISSHQHDGMEAYVKVDSCPEEPQLRMKNNEEAEDYDDDLTDSEMDVVRFDDDNSPSFIQIRSVAKKHPKTWVHYIAAEEEDWDYAPLVLAPDDRSYKSQYLNNGPQRIGRKYKKVRFMAYTDETFKTREAIQHESGILGPLLYGEVGDTLLIIFKNQASRPYNIYPHGITDVRPLYSRRLPKGVKHLKDFPILPGEIFKYKWTVTVEDGPTKSDPRCLTRYYSSFVNMERDLASGLIGPLLICYKESVDQRGNQIMSDKRNVILFSVFDENRSWYLTENIQRFLPNPAGVQLEDPEFQASNIMHSINGYVFDSLQLSVCLHEVAYWYILSIGAQTDFLSVFFSGYTFKHKWVYEDTLTLFPFSGETVFMSMENPGLWILGCWNSDFRNRGMTALLKVSSCDKNTGDYYEDSYEDISAYLLSKNNAIEPRSFSQNPPVLKRHQREITRTTLQSDQEEIDYDDTISVEMKKEDFDIYDEDENQSPRSFQKKTRHYFIAAVERLWDYGMSSSPHVLRNRAQSGSVPQFKKVVFQEFTDGSFTQPLYRGELNEHLGLLGPYIRAEVEDNIMVTFRNQASRPYSFYSSLISYEEDQRQGAEPRKNFVKPNETKTYFWKVQHHMAPTKDEFDCKAWAYFSDVDLEKDVHSGLIGPLLVCHTNTLNPAHGRQVTVQEFALFFTIFDETKSWYFTENMERNCRAPCNIQMEDPTFKENYRFHAINGYIMDTLPGLVMAQDQRIRWYLLSMGSNENIHSIHFSGHVFTVRKKEEYKMALYNLYPGVFETVEMLPSKAGIWRVECLIGEHLHAGMSTLFLVYSNKCQTPLGMASGHIRDFQITASGQYGQWAPKLARLHYSGSINAWSTKEPFSWIKVDLLAPMIIHGIKTQGARQKFSSLYISQFIIMYSLDGKKWQTYRGNSTGTLMVFFGNVDSSGIKHNIFNPPIIARYIRLHPTHYSIRSTLRMELMGCDLNSCSMPLGMESKAISDAQITASSYFTNMFATWSPSKARLHLQGRSNAWRPQVNNPKEWLQVDFQKTMKVTGVTTQGVKSLLTSMYVKEFLISSSQDGHQWTLFFQNGKVKVFQGNQDSFTPVVNSLDPPLLTRYLRIHPQSWVHQIALRMEVLGCEAQDLY

SEQ ID NO: 86 - protein, 1438 aa, Artificial Sequence
  FVIII 12SS-SQ amino acid sequence
ATRRYYLGAVELSWDYMQSDLGELPVDARFPPRVPKSFPFNTSVVYKKTLFVEFTDHLFNIAKPRPPWMGLLGPTIQAEVYDTVVITLKNMASHPVSLHAVGVSYWKASEGAEYDDQTSQREKEDDKVFPGGSHTYVWQVLKENGPMASDPLCLTYSYLSHVDLVKDLNSGLIGALLVCREGSLAKEKTQTLHKFILLFAVFDEGKSWHSETKNSLMQDRDAASARAWPKMHTVNGYVNRSLPGLIGCHRKSVYWHVIGMGTTPEVHSIFLEGHTFLVRNHRQASLEISPITFLTAQTLLMDLGQFLLFCHISSHQHDGMEAYVKVDSCPEEPQLRMKNNEEAEDYDDDLTDSEMDVVRFDDDNSPSFIQIRSVAKKHPKTWVHYIAAEEEDWDYAPLVLAPDDRSYKSQYLNNGPQRIGRKYKKVRFMAYTDETFKTREAIQHESGILGPLLYGEVGDTLLIIFKNQASRPYNIYPHGITDVRPLYSRRLPKGVKHLKDFPILPGEIFKYKWTVTVEDGPTKSDPRCLTRYYSSFVNMERDLASGLIGPLLICYKESVDQRGNQIMSDKRNVILFSVFDENRSWYLTENIQRFLPNPAGVQLEDPEFQASNIMHSINGYVFDSLQLSVCLHEVAYWYILSIGAQTDFLSVFFSGYTFKHKMVYEDTLTLFPFSGETVFMSMENPGCWILGCHNSDFRNRGMTALLKVSSCDKNTGDYYEDSYEDISAYLLSKNNAIEPRSFSQNPPVLKRHQREITRTTLQSDQEEIDYDDTISVEMKKEDFDIYDEDENQSPRSFQKKTRHYFIAAVERLWDYGMSSSPHVLRNRAQSGSVPQFKKVVFQEFTDGSFTQPLYRGELNEHLGLLGPYIRAEVEDNIMVTFRNQASRPYSFYSSLISYEEDQRQGCEPRKNFVKPNETKTYFWKVQHHMAPTKDEFDCKAWAYFSDVDLEKDVHSGLIGPLLVCHTNTLNPAHGRQVTVQEFALFFTIFDETKSWYFTENMERNCRAPCNIQMEDPTFKENYRFHAINGYIMDTLPGLVMAQDQRIRWYLLSMGSNENIHSIHFSGHVFTVRKKEEYKMALYNLYPGVFETVEMLPSKAGIWRVECLIGEHLHAGMSTLFLVYSNKCQTPLGMASGHIRDFQITASGQYGQWAPKLARLHYSGSINAWSTKEPFSWIKVDLLAPMIIHGIKTQGARQKFSSLYISQFIIMYSLDGKKWQTYRGNSTGTLMVFFGNVDSSGIKHNIFNPPIIARYIRLHPTHYSIRSTLRMELMGCDLNSCSMPLGMESKAISDAQITASSYFTNMFATWSPSKARLHLQGRSNAWRPQVNNPKEWLQVDFQKTMKVTGVTTQGVKSLLTSMYVKEFLISSSQDGHQWTLFFQNGKVKVFQGNQDSFTPVVNSLDPPLLTRYLRIHPQSWVHQIALRMEVLGCEAQDLY

SEQ ID NO: 87 - protein, 1438 aa, Artificial Sequence
  FVIII 28SS-SQ amino acid sequence
ATRRYYLGAVELSWDYMQSDLGELPVDARFPPRVPKSFPFNTSVVYKKTLFVEFTDHLFNIAKPRPPWMGLLGPTIQAEVYDTVVITLKNMASHPVSLHAVGVSYWKASEGAEYDDQTSQREKEDDKVFPGGSHTYVWQVLKENGPMASDPLCLTYSYLSHVDLVKDLNSGLIGALLVCREGSLAKEKTQTLHKFILLFAVFDEGKSWHSETKNSLMQDRDAASARAWPKMHTVNGYVNRSLPGLIGCHRKSVYWHVIGMGTTPEVHSIFLEGHTFLVRNHRQASLEISPITFLTAQTLLMDLGQFLLFCHISSHQHDGMEAYVKVDSCPEEPQLRMKNNEEAEDYDDDLTDSEMDVVRFDDDNSPSFIQIRSVAKKHPKTWVHYIAAEEEDWDYAPLVLAPDDRSYKSQYLNNGPQRIGRKYKKVRFMAYTDETFKTREAIQHESGILGPLLYGEVGDTLLIIFKNQASRPYNIYPHGITDVRPLYSRRLPKGVKHLKDFPILPGEIFKYKWTVTVEDGPTKSDPRCLTRYYSSFVNMERDLASGLIGPLLICYKESVDQRGNQIMSDKRNVILFSVFDENRSWYLTENIQRFLPNPAGVQLEDPEFQASNIMHSINGYVFDSLQLSVCLHEVAYWYILSIGAQTDFLSVFFSGYTFKHKMVYEDTLTLFPFSGETVFMSMECPGLWILGCHNSDFRNRGMTALLKVSSCDKNTGDYYEDSYEDISAYLLSKNNAIEPRSFSQNPPVLKRHQREITRTTLQSDQEEIDYDDTISVEMKKEDFDIYDEDENQSPRSFQKKTRHYFIAAVERLWDYGMSSSPHVLRNRAQSGSVPQFKKVVFQEFTDGSFTQPLYRGELNEHLGLLGPYIRAEVEDNIMVTFRNQASRPYSFYSSLICYEEDQRQGAEPRKNFVKPNETKTYFWKVQHHMAPTKDEFDCKAWAYFSDVDLEKDVHSGLIGPLLVCHTNTLNPAHGRQVTVQEFALFFTIFDETKSWYFTENMERNCRAPCNIQMEDPTFKENYRFHAINGYIMDTLPGLVMAQDQRIRWYLLSMGSNENIHSIHFSGHVFTVRKKEEYKMALYNLYPGVFETVEMLPSKAGIWRVECLIGEHLHAGMSTLFLVYSNKCQTPLGMASGHIRDFQITASGQYGQWAPKLARLHYSGSINAWSTKEPFSWIKVDLLAPMIIHGIKTQGARQKFSSLYISQFIIMYSLDGKKWQTYRGNSTGTLMVFFGNVDSSGIKHNIFNPPIIARYIRLHPTHYSIRSTLRMELMGCDLNSCSMPLGMESKAISDAQITASSYFTNMFATWSPSKARLHLQGRSNAWRPQVNNPKEWLQVDFQKTMKVTGVTTQGVKSLLTSMYVKEFLISSSQDGHQWTLFFQNGKVKVFQGNQDSFTPVVNSLDPPLLTRYLRIHPQSWVHQIALRMEVLGCEAQDLY

SEQ ID NO: 88 - protein, 1438 aa, Artificial Sequence
  FVIII 31SS-SQ amino acid sequence
ATRRYYLGAVELSWDYMQSDLGELPVDARFPPRVPKSFPFNTSVVYKKTLFVEFTDHLFNIAKPRPPWMGLLGPTIQAEVYDTVVITLKNMASHPVSLHAVGVSYWKASEGAEYDDQTSQREKEDDKVFPGGSHTYVWQVLKENGPMASDPLCLTYSYLSHVDLVKDLNSGLIGALLVCREGSLAKEKTQTLHKFILLFAVFDEGKSWHSETKNSLMQDRDAASARAWPKMHTVNGYVNRSLPGLIGCHRKSVYWHVIGMGTTPEVHSIFLEGHTFLVRNHRQASLEISPITFLTAQTLLMDLGQFLLFCHISSHQHDGMEAYVKVDSCPEEPQLRMKNNEEAEDYDDDLTDSEMDVVRFDDDNSPSFIQIRSVAKKHPKTWVHYIAAEEEDWDYAPLVLAPDDRSYKSQYLNNGPQRIGRKYKKVRFMAYTDETFKTREAIQHESGILGPLLYGEVGDTLLIIFKNQASRPYNIYPHGITDVRPLYSRRLPKGVKHLKDFPILPGEIFKYKWTVTVEDGPTKSDPRCLTRYYSSFVNMERDLASGLIGPLLICYKESVDQRGNQIMSDKRNVILFSVFDENRSWYLTENIQRFLPNPAGVQLEDPEFQASNIMHSINGYVFDSLQLSVCLHEVAYWYILSIGAQTDFLSVFFSGYTFKHKMVYEDTLTLFPFSGETVFMSMENPGLWILGCHNCDFRNRGMTALLKVSSCDKNTGDYYEDSYEDISAYLLSKNNAIEPRSFSQNPPVLKRHQREITRTTLQSDQEEIDYDDTISVEMKKEDFDIYDEDENQSPRSFQKKTRHYFIAAVERLWDYGMSSSPHVLRNRAQSGSVPQFKKVVFQEFTDGSFTQPLYRGELNEHLGLLGPYIRAEVEDNIMVTFRNQASRPYSFYSSLISYEEDQRQGAEPRKNFVKPNETKTYFWKVQHHMAPTKDEFDCKAWAYFSDVDLCKDVHSGLIGPLLVCHTNTLNPAHGRQVTVQEFALFFTIFDETKSWYFTENMERNCRAPCNIQMEDPTFKENYRFHAINGYIMDTLPGLVMAQDQRIRWYLLSMGSNENIHSIHFSGHVFTVRKKEEYKMALYNLYPGVFETVEMLPSKAGIWRVECLIGEHLHAGMSTLFLVYSNKCQTPLGMASGHIRDFQITASGQYGQWAPKLARLHYSGSINAWSTKEPFSWIKVDLLAPMIIHGIKTQGARQKFSSLYISQFIIMYSLDGKKWQTYRGNSTGTLMVFFGNVDSSGIKHNIFNPPIIARYIRLHPTHYSIRSTLRMELMGCDLNSCSMPLGMESKAISDAQITASSYFTNMFATWSPSKARLHLQGRSNAWRPQVNNPKEWLQVDFQKTMKVTGVTTQGVKSLLTSMYVKEFLISSSQDGHQWTLFFQNGKVKVFQGNQDSFTPVVNSLDPPLLTRYLRIHPQSWVHQIALRMEVLGCEAQDLY

SEQ ID NO: 89 - protein, 12 aa, Artificial Sequence
  Amino acids 656-667 of SEQ ID NO:1
YTFKHKMVYEDT

SEQ ID NO: 90 - protein, 12 aa, Artificial Sequence
  Amino acids 1823-1834 of SEQ ID NO:1
MAPTKDEFDCKA

SEQ ID NO: 91 - protein, 736 aa, Artificial Sequence
  Amino acid sequence of LK03 capsid
MAADGYLPDWLEDNLSEGIREWWALQPGAPKPKANQQHQDNARGLVLPGYKYLGPGNGLDKGEPVNAADAAALEHDKAYDQQLKAGDNPYLKYNHADAEFQERLKEDTSFGGNLGRAVFQAKKRLLEPLGLVEEAAKTAPGKKRPVDQSPQEPDSSSGVGKSGKQPARKRLNFGQTGDSESVPDPQPLGEPPAAPTSLGSNTMASGGGAPMADNNEGADGVGNSSGNWHCDSQWLGDRVITTSTRTWALPTYNNHLYKQISSQSGASNDNHYFGYSTPWGYFDFNRFHCHFSPRDWQRLINNNWGFRPKKLSFKLFNIQVKEVTQNDGTTTIANNLTSTVQVFTDSEYQLPYVLGSAHQGCLPPFPADVFMVPQYGYLTLNNGSQAVGRSSFYCLEYFPSQMLRTGNNFQFSYTFEDVPFHSSYAHSQSLDRLMNPLIDQYLYYLNRTQGTTSGTTNQSRLLFSQAGPQSMSLQARNWLPGPCYRQQRLSKTANDNNNSNFPWTAASKYHLNGRDSLVNPGPAMASHKDDEEKFFPMHGNLIFGKEGTTASNAELDNVMITDEEEIRTTNPVATEQYGTVANNLQSSNTAPTTRTVNDQGALPGMVWQDRDVYLQGPIWAKIPHTDGHFHPSPLMGGFGLKHPPPQIMIKNTPVPANPPTTFSPAKFASFITQYSTGQVSVEIEWELQKENSKRWNPEIQYTSNYNKSVNVDFTVDTNGVYSEPRPIGTRYLTRPL

SEQ ID NO: 92 - protein, 736 aa, Adeno-associated virus 6
MAADGYLPDWLEDNLSEGIREWWDLKPGAPKPKANQQKQDDGRGLVLPGYKYLGPFNGLDKGEPVNAADAAALEHDKAYDQQLKAGDNPYLRYNHADAEFQERLQEDTSFGGNLGRAVFQAKKRVLEPFGLVEEGAKTAPGKKRPVEQSPQEPDSSSGIGKTGQQPAKKRLNFGQTGDSESVPDPQPLGEPPATPAAVGPTTMASGGGAPMADNNEGADGVGNASGNWHCDSTWLGDRVITTSTRTWALPTYNNHLYKQISSASTGASNDNHYFGYSTPWGYFDFNRFHCHFSPRDWQRLINNNWGFRPKRLNFKLFNIQVKEVTTNDGVTTIANNLTSTVQVFSDSEYQLPYVLGSAHQGCLPPFPADVFMIPQYGYLTLNNGSQAVGRSSFYCLEYFPSQMLRTGNNFTFSYTFEDVPFHSSYAHSQSLDRLMNPLIDQYLYYLNRTQNQSGSAQNKDLLFSRGSPAGMSVQPKNWLPGPCYRQQRVSKTKTDNNNSNFTWTGASKYNLNGRESIINPGTAMASHKDDKDKFFPMSGVMIFGKESAGASNTALDNVMITDEEEIKATNPVATERFGTVAVNLQSSSTDPATGDVHVMGALPGMVWQDRDVYLQGPIWAKIPHTDGHFHPSPLMGGFGLKHPPPQILIKNTPVPANPPAEFSATKFASFITQYSTGQVSVEIEWELQKENSKRWNPEVQYTSNYAKSANVDFTVDNNGLYTEPRPIGTRYLTRPL

SEQ ID NO: 93 - protein, 106 aa, Artificial Sequence
  The part of FVIII polypeptide SQ amino acid sequence (95) shown in Fig 5 which contains the BDR region
MTALLKVSSCDKNTGDYYEDSYEDISAYLLSKNNAIEPRSFSQNPPVLKRHQREITRTTLQSDQEEIDYDDTISVEMKKEDFDIYDEDENQSPRSFQKKTRHYFIA

SEQ ID NO: 94 - protein, 92 aa, Artificial Sequence
  The part of FVIII polypeptide RE amino acid sequence (85) shown in Fig 5 which contains the BDR region
MTALLKVSSCDKNTGDYYEDSYEDISAYLLSKNNAIEPREITRTTLQSDQEEIDYDDTISVEMKKEDFDIYDEDENQSPRSFQKKTRHYFIA

SEQ ID NO: 95 - protein, 71 aa, Artificial Sequence
  The part of FVIII polypeptide 96 amino acid sequence shown in Fig 5 which contains the modified BDR region
MTALLKVSSCDKNTGDYYEDSYEDISAYLLSKNNAIEPRVEMKKEDFDIYDEDENQSPRSFQKKTRHYFIA

SEQ ID NO: 96 - protein, 51 aa, Artificial Sequence
  The part of FVIII polypeptide 97 amino acid sequence shown in Fig 5 which contains the modified BDR region
MTALLKVSSCDKNTGDYYEDSYEDISAYLLSKNNAIEPRSFQKKTRHYFIA

SEQ ID NO: 97 - protein, 52 aa, Artificial Sequence
  The part of FVIII polypeptide 98 amino acid sequence shown in Fig 5 which contains the modified BDR region
MTALLKVSSCDKNTGDYYEDSYEDISAYLLSKNNAIEPRRSFQKKTRHYFIA

SEQ ID NO: 98 - protein, 63 aa, Artificial Sequence
  The part of FVIII polypeptide 99 amino acid sequence shown in Fig 5 which contains the modified BDR region
MTALLKVSSCDKNTGDYYEDSYEDISAYLLSKNNAIEPRVEMKKEDFDIYRSFQKKTRHYFIA

SEQ ID NO: 99 - protein, 44 aa, Artificial Sequence
  The part of FVIII polypeptide 100 amino acid sequence shown in Fig 5 which contains the modified BDR region
MTALLKVSSCDKVEMKKEDFDIYDEDENQSPRSFQKKTRHYFIA

SEQ ID NO: 100 - protein, 36 aa, Artificial Sequence
  The part of FVIII polypeptide 101 amino acid sequence shown in Fig 5 which contains the modified BDR region
MTALLKVSSCDKVEMKKEDFDIYRSFQKKTRHYFIA

SEQ ID NO: 101 - protein, 25 aa, Artificial Sequence
  The part of FVIII polypeptide 102 amino acid sequence shown in Fig 5 which contains the modified BDR region
MTALLKVSSCDKRSFQKKTRHYFIA

SEQ ID NO: 102 - protein, 65 aa, Artificial Sequence
  The part of FVIII polypeptide 103 amino acid sequence shown in Fig 5 which contains the modified BDR region
MTALLKVSSCDKEITRTTLQSDQEEIDYDDTISVEMKKEDFDIYDEDENQSPRSFQKKTRHYFIA

SEQ ID NO: 103 - protein, 89 aa, Artificial Sequence
  The part of FVIII polypeptide 104 amino acid sequence shown in Fig 5 which contains the modified BDR region
MTALLKVSSCDKNTGDYYEDSYEDISAYLLSKNNAIEITRTTLQSDQEEIDYDDTISVEMKKEDFDIYDEDENQSPRSFQKKTRHYFIA

SEQ ID NO: 104 - protein, 86 aa, Artificial Sequence
  The part of FVIII polypeptide 105 amino acid sequence shown in Fig 5 which contains the modified BDR region
MTALLKVSSCDKNTGDYYEDSYEDISAYLLSKNEITRTTLQSDQEEIDYDDTISVEMKKEDFDIYDEDENQSPRSFQKKTRHYFIA

SEQ ID NO: 105 - protein, 83 aa, Artificial Sequence
  The part of FVIII polypeptide 106 amino acid sequence shown in Fig 5 which contains the modified BDR region
MTALLKVSSCDKNTGDYYEDSYEDISAYLLEITRTTLQSDQEEIDYDDTISVEMKKEDFDIYDEDENQSPRSFQKKTRHYFIA

SEQ ID NO: 106 - protein, 80 aa, Artificial Sequence
  The part of FVIII polypeptide 107 amino acid sequence shown in Fig 5 which contains the modified BDR region
MTALLKVSSCDKNTGDYYEDSYEDISAEITRTTLQSDQEEIDYDDTISVEMKKEDFDIYDEDENQSPRSFQKKTRHYFIA

SEQ ID NO: 107 - protein, 77 aa, Artificial Sequence
  The part of FVIII polypeptide 108 amino acid sequence shown in Fig 5 which contains the modified BDR region
MTALLKVSSCDKNTGDYYEDSYEDEITRTTLQSDQEEIDYDDTISVEMKKEDFDIYDEDENQSPRSFQKKTRHYFIA

SEQ ID NO: 108 - protein, 74 aa, Artificial Sequence
  The part of FVIII polypeptide 109 amino acid sequence shown in Fig 5 which contains the modified BDR region
MTALLKVSSCDKNTGDYYEDSEITRTTLQSDQEEIDYDDTISVEMKKEDFDIYDEDENQSPRSFQKKTRHYFIA

SEQ ID NO: 109 - protein, 71 aa, Artificial Sequence
  The part of FVIII polypeptide 110 amino acid sequence shown in Fig 5 which contains the modified BDR region
MTALLKVSSCDKNTGDYYEITRTTLQSDQEEIDYDDTISVEMKKEDFDIYDEDENQSPRSFQKKTRHYFIA

SEQ ID NO: 110 - protein, 68 aa, Artificial Sequence
  The part of FVIII polypeptide 111 amino acid sequence shown in Fig 5 which contains the modified BDR region
MTALLKVSSCDKNTGEITRTTLQSDQEEIDYDDTISVEMKKEDFDIYDEDENQSPRSFQKKTRHYFIA

SEQ ID NO: 111 - protein, 86 aa, Artificial Sequence
  The part of FVIII polypeptide 112 amino acid sequence shown in Fig 5 which contains the modified BDR region
MTALLKVSSCDKNTGDYYEDSYEDISAYLLSKNNAIRTTLQSDQEEIDYDDTISVEMKKEDFDIYDEDENQSPRSFQKKTRHYFIA

SEQ ID NO: 112 - protein, 83 aa, Artificial Sequence
  The part of FVIII polypeptide 113 amino acid sequence shown in Fig 5 which contains the modified BDR region
MTALLKVSSCDKNTGDYYEDSYEDISAYLLSKNNAILQSDQEEIDYDDTISVEMKKEDFDIYDEDENQSPRSFQKKTRHYFIA

SEQ ID NO: 113 - protein, 80 aa, Artificial Sequence
  The part of FVIII polypeptide 114 amino acid sequence shown in Fig 5 which contains the modified BDR region
MTALLKVSSCDKNTGDYYEDSYEDISAYLLSKNNAIDQEEIDYDDTISVEMKKEDFDIYDEDENQSPRSFQKKTRHYFIA

SEQ ID NO: 114 - protein, 77 aa, Artificial Sequence
  The part of FVIII polypeptide 115 amino acid sequence shown in Fig 5 which contains the modified BDR region
MTALLKVSSCDKNTGDYYEDSYEDISAYLLSKNNAIEIDYDDTISVEMKKEDFDIYDEDENQSPRSFQKKTRHYFIA

SEQ ID NO: 115 - protein, 74 aa, Artificial Sequence
  The part of FVIII polypeptide 116 amino acid sequence shown in Fig 5 which contains the modified BDR region
MTALLKVSSCDKNTGDYYEDSYEDISAYLLSKNNAIYDDTISVEMKKEDFDIYDEDENQSPRSFQKKTRHYFIA

SEQ ID NO: 116 - protein, 71 aa, Artificial Sequence
  The part of FVIII polypeptide 117 amino acid sequence shown in Fig 5 which contains the modified BDR region
MTALLKVSSCDKNTGDYYEDSYEDISAYLLSKNNAITISVEMKKEDFDIYDEDENQSPRSFQKKTRHYFIA

SEQ ID NO: 117 - protein, 62 aa, Artificial Sequence
  The part of FVIII polypeptide 96-106 amino acid sequence shown in Fig 5 which contains the modified BDR region
MTALLKVSSCDKNTGDYYEDSYEDISAYLLVEMKKEDFDIYDEDENQSPRSFQKKTRHYFIA

SEQ ID NO: 118 - protein, 54 aa, Artificial Sequence
  The part of FVIII polypeptide 99-106 amino acid sequence shown in Fig 5 which contains the modified BDR region
MTALLKVSSCDKNTGDYYEDSYEDISAYLLVEMKKEDFDIYRSFQKKTRHYFIA

SEQ ID NO: 119 - protein, 53 aa, Artificial Sequence
  The part of FVIII polypeptide 96-109 amino acid sequence shown in Fig 5 which contains the modified BDR region
MTALLKVSSCDKNTGDYYEDSVEMKKEDFDIYDEDENQSPRSFQKKTRHYFIA

SEQ ID NO: 120 - protein, 45 aa, Artificial Sequence
  The part of FVIII polypeptide 99-109 amino acid sequence shown in Fig 5 which contains the modified BDR region
MTALLKVSSCDKNTGDYYEDSVEMKKEDFDIYRSFQKKTRHYFIA

SEQ ID NO: 121 - protein, 59 aa, Artificial Sequence
  The part of FVIII polypeptide 96-107 amino acid sequence shown in Fig 5 which contains the modified BDR region
MTALLKVSSCDKNTGDYYEDSYEDISAVEMKKEDFDIYDEDENQSPRSFQKKTRHYFIA

SEQ ID NO: 122 - protein, 62 aa, Artificial Sequence
  The part of FVIII polypeptide 107-117 amino acid sequence shown in Fig 5 which contains the modified BDR region
MTALLKVSSCDKNTGDYYEDSYEDISATISVEMKKEDFDIYDEDENQSPRSFQKKTRHYFIA

SEQ ID NO: 123 - DNA, 10 bp, Artificial Sequence
  transcription regulatory element ten-nucleotide termination sequence 'a'
acagtgaatc

SEQ ID NO: 124 - DNA, 10 bp, Artificial Sequence
  transcription regulatory element ten-nucleotide termination sequence 'b'
ctcctcagct
